United States Patent Application Publication US 2024/0268394 A1 - sequence listing, part 2

SEQ ID NO: 13 - DNA, 360103 bp, Pseudomonas nodulensis
  misc_feature (181656)..(181691): n is a, c, g, or t
  misc_feature (282429)..(282467): n is a, c, g, or t
  misc_feature (319932)..(319966): n is a, c, g, or t
caggctcatggtatctctcgtgtcccaaggcatgatgatttcccggcgaagtttatccgccgaaaagtgtccaccatgtccccgtacacccgtcaaccatgtgtccggtccatacaggcctttccaaaagtgacccgccgtaagggcggaaccataagccgccgttacataaaaaacggatatgtactcaatcaaacctgaaaccgctgccgctccgactcatacaacggcttcaccaacgcaaactcccgatcaatctgatcgaccagctcccccagatccccaaccgcagactcaaccgactcaacctccaaccgctgacacaactgcgccaaccgcactgccccaaggttcccactgctgcccttgaaactatgcgcaatccgccccaacgccttggcatcatccctggccttgcgcagcgcttcgacgcgtttttgggaatcatcgagaaaggtatcaagcagcttgggatactcgccttccatgacttcctgcaaacccgacaacacctccgggtccagatgtagatcaaccacttgctcgctccttgatcaagaatcggcggattatgccagagcctcccaggaaaactccacgcagacactgcgcccgccgtccgaccagcgtacatcgctgctcaattgacgcaccaggctcaagccccggcctgacagacggtcaatatcgagcggccgcgccagcatctgctccacgtcgaacccaggaccgctgtcctcgatgcgcagggtcatcctgccgccgacctcggtcggcagcacctgcacatgcacccgtatatagccgctgttgagttgtgccaggcggtcattacgcaggcggtaatactcggcaaacccttgggcgtcacgcttgagccgagaatccagacccagcacgccatgctccagcgcattggaatacagctccgccatcacgctgtacagcgccccgctctgctcccgcagaccatgaatctccagcagcagttgcagcaagtacggcaatgggttgtaacgcttcaacgtctcagcacgaaattcgaaactgactgaccaatccagcggacaagactggccactgtcggcatacaacggcccgctggcacgcagctgctggccggcgtgcagggtgatttccaccatgctcacgtcatcccgcgcttcgccccggaacgccgccagggcctgctcgatatcttcaaacagccgatccggctcacggttggcagcgaacacctgctgcaagcgttcagcgccgaacagctggtcattggcgtcagcggtatccagcacgccatcggacaacaggaacactcggtcacccaaggccatgggccagacttcggtgcgatcatcaaaagcttgcgccgacagcacccccaacggcaaatgccgcgattccagtggcgtacgcttgccggtggcgatttcatgcacgtagccttcgggcatgccgccgttccacacctccaccacccgccgctgggtgctcaggcacaacagggtggcgcagcagaacatgtccaccggcaggatgcgcttgagcttggcgttcatctcgcgcagggtctgcgccaggccgtagcccttggcggtcatgccgtagaacacttccgccaggggcatggcgcccaccgccgccggcaggccatgcccggtgaagtcgccgagcagcacatgcatgtcgccggacggggtgtaggcggccaacagcaaatcaccgttgaacaacgcatagggcgattgcaggtagcggatattcggcgcggcattgatacaaccggaatgggcaaccttgtcgaacaccgccttggccacccgctgctcatgcagcaggtagtcgtgatgcttggcaatcaggtcgcgctgctgcaaaaccgtcgcctgcaaccgacgcagacggtccatggcgttgatcttcgccgcgagaatcagctgattgtagggcttggctagaaagtcatcaccgccggcatccaggcactgagccagcgcttcgctctcgcgcagggacgtgaggaaaatcagcggcaccagctcctcacccgccaattgcttgatccggcgcgccgcctcaaagccgtccatcaccggcatcagcgcatccatcaacaccagctgcgggcgctcacgggtaaacaccgcgaccgcttcagcgccgttggtggccgtgagcacctggtggccctggcgccggataatggtcgacagcagcaacaggtcggcggcactgtcttcggcgatcaggattgtcagcggctcaaggaccggggccaggacgctcaactgatgtcgaacagtttgtcgaagttggagataccgaggatcttgcgcacatccgaattgctgttgatcacccggatatcggcgtcatcgccggcatggtcgcgcagcagcaagagcatgccgagggcggagctgtcgaggtaggtcgtctctttcaagtccacgatgtaagtgttgggcactttgtagaagcgctcataggcttcgcgaaacgtctggtggctgccgaaatcgaaccggcccttgactgcgatcgtcaacttcgtcccatccagggatacttctgactcgactgacatgtgactgcttccttgtcattggcaatgacacaaggtttagcaggtgccggggatgtgggcaactttcaatagacgtctttgcgcggcatgcgctgcgaaagctcatccagcaacttctgctcgcgcttgtcttcaagcgctcgcgcttcatcgatatagcgctgcaccagcttgcgcaaaccttcgacccgggcaaacgcggcttgccagctctcacgtgccttgtcgaggttgttctggtgccaggccaggctttggcgctgctggccgacggcggtttccaactggttgagaaagccctggtaacccatcagccattggccggacacgcccttgctgccgcgttcgatccattgttgctggtactcgccgcgaaagcgctccaggtcgcccagcttgctttccgccaagcggacttgcccctggaagtaacccaggcgctgcacggcggttttctcggctttttcggccatgtccaccaccggagccaggcgcgcggcgcggctgttggccatggcttagccgcctggcgccggggcgaagatcgactgcaggtgcgcttcgctttcgcccatgctgatcttgtcgttgagaccctggcgcaagtaggtgaccaattgcggttgcagggcaatcgccaagtcggtgtcgcgatcaccgcccgccacataggcgccgacgctgatcagatcgcggctctgctggtagcgcgaccacagctgcttgaactgttgtgcacgggccatgtgttccggcgtgaccacggccggcatcacccggctgatggacgcttcgatgtcgatggccgggtaatgcccttcttcggccaggcgccgtgacagcacgatgtggccgtcgagcacgccccgcgccgagtcggcaatcgggtcctgctggtcatcgccttcggacaatacggtgtagaacgcggtgatcgagccaccaccggcttcggcgttaccggcacgctccaccagcttgggcagcttggcgaataccgacggcgggtaacctttggtcgccggcggttcgccgatggccagggcgatttcccgctgggcctgggcgaaacgcgtgagcgaatccatcagcaacaggacattcttgcccttgtcgcggaaatattcggcgatgcgcgtgcagtacatggcggcgcgcaaccgcatcagcggcgcatcgtcagctggggaggcaaccaccaccgagcgcttgaggccttcttcaccgaggctgtgctcgatgaattccttcacctcgcggccccgctcgccgatcagcccgaccacgatgatgtcggcctcggtaaagcgcgtcatcatgcccagcaacaccgacttacccacgccggtaccggcgaacaggcccagacgctggccacggccgaccgtcaataatccgttgatgctgcgaatgcccacgtccagcggcacgctgatggggttgcggttgagcgggttgatggtggggccgtccatcggcacccagtcttcggccttcatgccgcccttgccgtccagcgcgcgaccggcgccgtcgagtacgcggccgagcatgctcatgcccatcggcaggcggccggtgtcggccaacggcaccacgcgggcgccgggggcaatgcccgccaggctgcccacgggcatcaggaaaatcttgctgccggaaaagcccatcacttcggcttcgacctgcaccgggtggtagctgtcgtcgttgatcaccatgcagcgactgcccatggcggcgcgcaggccttcggcttcgagggtcaggccgaccatgcgcagcaggcgcccttcgaggatcggctggccgggcaactccgtggcctcggcgtaaccacccaggcgcttggcgaagctggtgcggtcaaggcgcatcgacggcgtccaggtctacgctcagatcaggctcggccgggtgcagggcctgttcgtggagctgatcaaagagcttggccatgatttggctgatgcgggtttccaccgtggcatcgatgcggctgtgttcggtttcgacccggcaaccaccgggctgcaacgccgcgtcttcgacgatgcgccaggtttcttcatggcgctcgcgcaaggctttgacctgctcgaaatcctgcgggttgatgtacagccgcacgttgccgacgcccaggggcagcagcttgagcgcttcgcgcatcacgctttcgatatggctggaatccagcaccaactcgcgctggatcacctggcgggcaatgtgctgtaccaggccgaccatggccttttcgatctgcgaatcctgctcggcgatggggtcgaacagcgtacccatcaagcgttccaggctggccagcttgacgctcagcgcctcttcggcttcctggcgcaccttgagggtggtgctgcgaaaaccatctttttcacccgccgcaaagccttcgttgtaggcctcctggcggatggcttccagttcttccagggtcagtggctggacttcatccagcggcacttcttccatttccaccggaagttcttcgaccggttccggctcgggctccggcacatgcgggtcgaagctgggcaacgaccagatgtcgaacccaccgacgtcccgtgcgcgaatcagatcgctgggcgcctcatctttgttcgacatgggaagcgccttagatcatttcttcgccgcccttcccgccgagaacgatttctccggcttcggccatacggcgggcaatggtgaggatttctttctgcgcggtttccacgtcgctgacacgcaccgggcccttggcttccaggtcgtcgcgcaacagttccgaggcacgcttggacatgttcttgaagatcttctctttgacgttttcgtccgagcccttgagggccagcaccagcacgtccgaggacacttcgcgcagcaacgcctggatgccacggtcgtcgacatcggagaggttgttgaacacgaacatgaggtcttcgatctggccggacagggtgtcgtcgatctcgcggatcgagtccatcaactggccttcgaccgagctgtcgaggaagttcatgatgtccgccgcacgcttgataccccccagggtggtgcgcgaggcattcgagttgccggagaactgcttctccagaatcgtgttgagttctttcagcgccgccggctgcacggtgttcagcgacgacacgcgcaggatgatgtccaggcgcactttgtggtcgaagtggccgagcacttcaccggcctggtcggggtcgagatacgccaccacgatcgcctggatctgcgggtgttcgtagcggatcacgtcggcgacggcacgcggctccatccatttcaggctgtcgaggccgctggtgttgccacccagcaggatgcggtcgatcaggccgttggccttgtcttcgcccagggccgaggtgagcatcttgcggatgtagctgtcggagccgacgcccaggctggtctggtcgccgacgatctcgacgaactcgctcatcacctgctcgacttgctcgcggtgcacattgcgcatctgcgccatggccacgcccacgcgctggacctctttgggccccatgtggcgcagcacttgggcggcgtcggtttcaccgagggacagcagcaggactgcggctttgtcgaccttggtgagcttggcaacagcggctcgattatcactcatctgcgttgatccactctttcacgacctgggccacacggcccgggtcttctgccaccagacttttgattgcgttcaactgagcgtcgtagccttcgctcgggcttggcaacaggatgctttgcgggccgccgaggctgacgcggtcgttggccagttcgccgtccaggccgcccatgccacccaactcgacgtcgctgccaccaaaggccgccagttgtttcttgccgttgccggtgatgttgttgagcaccgggcgcagcacgccgaacaccagcaccaggatgaacaacacacccagcacttgcttgacgatgtcccagaaccacggctgcgtgtagaacgcagggtcagcgatcacttcgccacgctcggcggagaacggcatgttgatcacgctgacgctgtcaccgcggctggcgtcaaaaccgacagcgtcctgcaccaggcgcgtgaagcgtgccaattcatcggcgctccagggggcacgggtaacggcgccgtcggcggcattgaccttgacctggtcatccaccaccaccgacaccgacaggcgattgacgcggccctgttgctgcttggtgtggctgatggaacggtcgagttcgaagttcttggtcgactggttacgcttgtccgccgggtacggcgcgagcatcggctggccagtggccgggtccatgatctgttggccattggcgtccagcagtggctggcctggctggatggcgccagcgctggccgtcgcgccgccggtggtttgcggggccgaggccggggccggtggctggttgctcagggcgcccggtacgccttggggcgggccattggcggcagtgcgttgttcgctggtggattgctcgctgcgcagcgccggctggtccgggttgaactgctcggaggtcgattcgacagcgctgaagtccacatcggccgacacttcagccttgtagcggtcgttgcccaacaccggttgcaggatgttgtgcacacgctgggtgagcatgctttcgacgcgacggctgtaatcgaactgcttgccggcctgggtcagcgcggagttttccgcctggtcggacagcaggttgcccttctggtcgaccacagtgatttgcgacttgctcagctcaggcacgctggtggcgaccaggttgacgatcgccagcacctggcctggctccagggagcggccggcaaacagttccaccaataccgaggcgctgggcttgcgctcatcgcgcacaaacaccgagcttttcggaatggccaggtgcacacgggcacccttgacgttgttcaggctggagatggtgcgtgccagctcgccttccaggccacgacggtagcgggtggcttccatgaactggctggtgccgaggccctggtccttgtcgaggatttcaaaaccgatattggcgtcggacggggtgacgccggccgccgcgagtttcatgcgcgcacgggccacgtcgtcggccttgaccagcagcgccccggagttgggttccacggtgtaggcgatgtcggcggcggccagggtttccatgatctgcttggaatccatgccggccaggcttccatagagcggccggtaatccggttgctgcgaccacagcaccacggcaaaaccaatcgccacgctcgcggccaggccgaccatcaggccgacctgacgcaacatggtcatttcggaaaggttttccaggaacgacaggccaaacagcggcggcttgccgtctgccttggcgggtgcgttgtccacgactgcttctgccatgacttaaatctcgtccttaaaccggcatctgcatgatgtcttggtaagcctgaaccagcttgttacgcacctgggtcaacgcctggaacgacacgctggccttttgcgaggcaaccatcacatcggtgaggtccacgccgcttttgccgatctcgaacgcgttggccaactggctggaggcttgctgggtatcactgactttgttgatggcctggccgagcatgtcggcgaagctgctttggcccaattccggcgctggcgcgacggatttcggttgagccatggcatccatttgcatggagcgcatatccaacatcaaccgattgaactcaataccctggctcatgaacttctctctccgacaaccgcatgttttttgacgctacgccgcaattactaggtgaagtagcaacaagggtgccagctctggttcaactcgtaagaaaaggcgacaaaccttgtccgccttgttaccgatcaggtggcgaacagatacgcctcgacgtccatgccggcgtcgcgcatctgcgccagcttgtagcgcaaggtccgcgggctgatccccaggcgctcggcggcctctttgcggcggccgcgctcggcgcgcagggtatcgatgatcatctggaattcacggcgacgcaggtcgtcacccaatgcaccggcggtttcggattcgacaaccacgggcgcaggcgccagggtcggcagcggcgcaatcccgctgcccatggccaggcagaaatcctggggctggatcaggccgccctgttgcaggatcaacgcacgctggatggcgttgtccaattcccgcacattccccggccatggataggcgaccaggcaggcctgggcctcggccgacaggcgtgcctgggcatgcttcatttttttgacgtgattgcccaacagccgctcggccagcggaatgatatccgccgggcgctcgcgcaacgggcgccaggccaggggaaagaccgagagacggtagaacaggtcttcacggaagcgccccgccgccacttcgcccgccaagtcacggttggtggtggcgaccacgcggatatccagctggattggcttgcgtgcgccaacgcgctccacttcgcgctcttgcagcacccgcagcaacttggcttgcaggcccaggggcatctcggaaatttcatcgagcaaaatcgtgccgccatccgcctgctcgaacttgcccgcctgggccgcgatggcgccggtgaacgagcctttttcgtggccgaacagcgtggcttcgagcatgttgtcggggatcgccgcgcagttgatggcgataaacggctgtttggcgcgggtcgattgctggtggatatagcgggccagcacctccttaccggtgccggactcgccggaaatcagcacggtggaatcactgcgcgccacgcgggccgccaattccagcaattgtgcgctggccggctcgaaggcaatcgggccttcgccgtcgctgggcgggatcacgcccagggcatgccgcgcgaccagttcgatcaaggctttgggctcgaacggtttgaccagataatccgccgcgccctggcgcattgcgtcgaccgcacgctcgacagcgccgtgggcggtcatcagcaacaccggcaactgcggctggcgcgcgcgcaacaggctgagcaactggtggccgtccatgcccggcatgttcacatcgctgaccactaggctgaaggactcctgctccaccgcctccaaggcgtcctcggcagaaccgaccgcccggtagtcatggcccgccaacagcagcgtgtcagccaatgcttcacgcagcgcgcgatcgtcttccaccaacagaaccttgatagccataacctcttactccgcgcttgccgcacatgaaaacagcggcaaggtcatcaatgcacaggtgccacgcccgacacgggaatgcagcagcaattctccctgatgggcgcgtgccactgccttgaccacggtcaggcccaggcccgtgccgttggtcttggtggtgaaaaagggttcgcccaggcgctgcaacacgacgggctcgataccgctgccactgtcgctgatgcacaggcgcagggtttgctcgcggctgtacaagtgcactttgagccgcgcaccggggccgctggcctgggtggcgttttcgatcaggttgagcagcgagccgacaagggtgtcgcggttgcacagcagctcgccgagatggctgtcgcactgccaacgcacttgcacgtcttgaatgtgagtggcggccgccgcttgcagggcctgcatcaactcggccggcgtgatgcggtcggtcagcggcaattcaccacgggcaaataccagcatgtcgcgcacctgatgctccaactcgtgcaggcgctccttgaggcgcccggcaaaacgctggtgggtggccgcaggcaattgctcatcagtcaaatgactggcgtagatcaacgccgccgacagtggcgtgcggatctgatgcgccagagaagcgaccatgcgccccagcgaagacaaacgctcgtggcgcgccaactggtcttgcaggtgacgggtttcagtcaggtcgttgagtagcacaagctggcccggctccgcgtccagggcgcgcgtggcaatggacaagcggcggccgtccttgagggagatttcatggccgtcgtcttcacgcggcgcaaagcagcgggtgatcacgtgacgccacagctcgccttccaggggcaggccaagcatgtcgcaagccgccgggttggcttcacgcacgcggccttcttcgtcgatgacgatcacgcccccgggcaacagcgacagcaggttttgcagacggttggccaggcgctccttctcggccaactcttccatgcgctgggcactgaccaccgccaactcgcccttgagctccgaaacacgggcttcgagcaggctgtaggaatcggtcaattggctggacatctggttgaacaacgaaaacgcctgctccaggccttggcggctttgctgttctacagagggaacgagccccgggatggcggggctggaagaatgttgggcggcgtggggcatcatgctctctcgcttggctgaccgtcagttaaacggaacgttgcgagggctgtagcaatacccgtgccgaaaaaaaaccgctgataaatcagcggtttgaaaaacaggcgtcaatcatccgcctgttcatcaccttctttgcggctcataccgtatttgcgcatcttctctaccagggtggttcgacggatgcgcaggcgctcggcggcacgggcgacgatgccgttggcgtcgtccagggcctgttggatcaggccttgttccaggttgccgaggtagtccttcaggtccaggccttcgggcggcagcatcgcggtagagccgaagtccggggtatgaccgttgatggccacccgttcttccaggtcgctgcgcaggctgtcgaccagttgctcgtcttcgtcgtcgacgtagcggaatttcttcggcagctcgaccacgccgatcacaccgtaggggtgcatgatcgccatgcgttccaccaggttggccagctcgcgcacgttgcccggccagccgtggcggcacagggacatgatcgcggcggagttgaaacggatcgagccgcgcttttcgtgttccatgcgcgagatcagttcgttcatcagcagcgggatatcctccacgcgctcacgcagcggggccatctcgatcgggaatacgttgaggcggtagtacaagtcttcgcggaagctgccgacctcgatcatgctttcgaggttcttgtgggtggccgcgatgatgcgcacgtcgacgctctgggtcttgttgctgcccacacgctcgaaggtgcgctcctgcaacacgcgcagcagcttgacctgcatcggcagcggcatgtcgccaatttcgtcgaggaacagggtgccgccgttggccaactcgaaacgcccggcacggctggtgatcgccccggtaaaggcgcccttctcgtggccgaacaattcactttcgagcagctctgccgggatcgccccgcagttgaccggcacaaatggcccgtcgcgacgcttggagtgatagtgcaggttgcgcgcgaccacttccttgccggtgccggactcgccgaggatcagcacgctggcgtcggtgtcggccacttgctgcatcatctggcgcacgtgctggatggcacggctggtgccgaccaggctgcggaacaggttgggttcgcgatggcgaccgcgctcgcgggcctggtcatacatctcgcgatagacctgggcacggtgcagggagtcgagcaatttgctgtagctgggcggcatctccagggtggaaagcacgcggcggcgctggtcttccggcaggtcgacagaagaaatatcgcccatcagcaacacgggaaggaactcatcccaggtagacagtgtctttaacaagcccaaaacagcaccaggagcgtttaccgtcccgatcagcacacaaatgacttcacggctcgatgacaatgagctgaccgcctgctgccagtcatggctgccgcagggcagattttcttcgccaagaaaattcaaaatcaccgctaaatcgcggcggcggacgctatcgtcatcaatcagcagaattttggtttcacgccacatgcaatagcaacttccctagtaaaacttcctgccccagagtgagggcaatcgagacgcctgtacgactttgtaccttactagacgtctgaaatctgaaaacagcactagttaagtcaaaaatgctggcacagtcaaatatatgacgcgcccatcggaccaactgcggctcttcagccgaacagatggtaaacctttgacgcatttttcgcttggttgatctgcgacatctcttcgaaaatcgcctgccgctcacccgtcgtcacctcgagcaattgctggtaaaccgccagcagactctcaagcttttcacgcaacgcatcctcgtctaccggcgcttcgctgagcacctcgtcgatgacatgacgacagcccaggtccagttcgccgatggcgtcccagttgcggtccgccagcgcgcccatcagcgcctcgcgggtttcatcaatgcgttgcaatgcttggctcatgacgtgttcctcaaggccgcttggccttattgtgcagcgccttgtggcgcgccgatggcatcccagccttctttcacggtaatcagcaaacgggcgacttcgtcgatcatgtcggcgtcgttgtgcagattggcctccatcaaacggttggtcatgtacacgtacagaccttccagttgctgaacgtattccttgttgtcgcttttttccgcgctcaggccatcacgaagcccgatgaggatgtcggcggccttgcccagcatcaggccctttgcggcgatatcgccacgcgccaacgcacctttggcctgcgccatgcggtcgagcccgccctccatcagcatttgcaccaggcggtgcgggctggcttcggagatctgggcatgggaattgaccttctggtattggcgaagggctctcatgggattcatgtttctacctcgtgacaggcaacagcgagaagggttgcaataaccattatgtcgactgggtcgcaaaaaactttaacccgacggcactatgaagaacaaagcccaggtcaatggacctgggctttttcatcagccatcaatcagctgcttttctgggcgttactcagcgcgctgagcgtacccaggatactgctgctctgctggcgcagttgcgccaccagcgtatccatggcggtgtacttgcgggtcaaggagtcttgcatggtggtgaggcgttcatccaacgcaacttgctgcttgttgaggtctttaaggctgtcggacaacgacgttgaacgcgtcgccaggatcccggtggtggccttggcatagccatcggtcgccgccgtcaggcgcgcgagcaggccggtcttgccgctgaagatactgttgatatcggcagcgttggtcagcacagccttgtcccactgcttggcatcaatgctcagcgcaccggtgtcgcggtcagtcgtcacaccgaattgcgccagggacttcaaggtgccattgccggacagggcgttgaactcgttgcggatcgccgcctgcaaggtgcgcatggtcgagtcgccggtcaaggtggcggcgacggagttaccggcggcatccttggtcaccttggtctcggcgttcatcgccttgagcagggcgttgtaggtgtcgacgaagcctttgaccccggacttgagggcggtggtgctggtggagacggagatggtcaaagcattgcgagccgtagacgcggtatccgaaggcgtggtcaagggcgacacagagagcaacttgatacttacaccactcactgcatccgtgatgctgttggtcttggactctgcagcaataccgtcaatggtgtacttggcgttcttcggctcgctgaccaccgtgtaaccggtatcaatccccgagttgcccgacatcgtcagatcggaaccaacaccagcattggtggaggtcaggataagacgcgaaccgttggagtcggtgaggatgttggcactcaggcctgcggtgccgaactgcgagttgattgagtcacgcacctgttgcagggtcgcgccggccggcaccttcaggtcgaagttcttgcccgactggctgatcgtcagcgtcgttggggtggtgccactgttcacgaccgtcgactggccgccagtgaaactcttggtcgacagcttcgacggcgtcgccaactggttgacgaccagcgagaagctaccgctcgccgcaccctggttggccgtcatggtggcgaccttctcgtccgaagacgtaccggtcaagccactgaagctgttatcggtgcccatgctggtcagcgcaccccggaaggcgtccagggctgcctggatcttgccgatcgacgacagctgggtggttgccttttgcgactggaggttgatctgagcctgtttcggcgctcgctcggcatccaccagggatttcacaatcgcctgagtgtcgaaacccgaccccacgccggtaatcgttgtacccgccatcatctttctcctgttccggtggctgccgttatcttgacgactagcgcttcaagcggtgacagcaacaagtttcatgccagttcacgccttgtcgtcaaacaatacatgactggcgctggccagactctgtgccagtttcaaggccgtttccgaaggaatctgtcggatcacttcaccggtgtcggtggcaatgaccttgaccacaaccctatgggtggaatcgtcaatggaaaagtccaggttgcgctgggccgcttgtacgaattctttaatatctgtaaccgctttttccaggctgtccttttgggacgtgcccgcggttggcgcggccgcttcaaccttagtcttgtctttgtccgcaaccacaggtgccggagtgccttgaggggccaacggcggataagacaagttcagttttacactcatgtccatgcccaatctcctctgattggaaaagacgaaagggcacgtaaacgcgcccttccgtcattcaccacgcgtcgctattactgaagcagcttcagtacagcggatggcagttggttagcctgcgacaggatcgcagtggaagccgactgcagggtttgctgcttggtcagttcagcggcttcggaagcgaagtcgacgtcctggatggtggaacgagcagcggtgctgtttttctggatgttggacaggttgtctacagtgctggtcagacggttctgtaccgcacccaggcccgaacgggagctggagatggtagcgatagcctggtcgatcacggacacagcgttctgggccttggtggcgtcagtcacgtcagtttgcgatacggaggtcttggtcgaagcagccgaagtagcagcaccgaagacaccagtcacaccagcgccttccagggagtaacccttggcggagtccaggttcactgcaccggtagcgatgatgccgtcagccagggcagtggcagtgccgtaggtgcccgaaccgtctttggtggcaacagtgatggtgccggcagcggtcgaagcgctgaaggccaggttttcaccggtgtcggatttaaccgacagagtgcctttggactcgtcgtagttgacgctgatacccaatttggcggagttcgacttcagttggtcagccaggctggcagtgtcttttacgccaacgaacgtggtggcttggccgccaacggtcatggtgaacgaagctggagcggtagcagcaccggcgccgactacgaactgagcttcagtgctggcggtagcgctcaggccaccgacggcgccgttcagctgggcagcgatggttttagcggaagcagcagcagcaacagtgacgctgctagtctggccgttaccggtcactgcgattgcgccgccagctacaccagcacctggagtgatgccgatgctcttcacctgctgcgaaccgatattgttggcagcaacgttatccagggacaggttgatggtttcgttagcgttggcgccaacctggatcgacttggtaccgtacgaaccgtccagcagcttctggccaccgaaagtagtggtctgggcgatacgggtcagttccgaagtcagggcctggtattcgtcgttgttcgacttacggtcgtcggggctcagggagccggtagccgaggacagagccagagtacgcattttttgcagaatgtcggtcgaagcctgcattgcgccttcagcggtctgcgcgatggagataccatcgttggcgttctttacagcttgacccaggccgttgatctggctggtcatacggctggcgatacccaggccggcggcgtcgtctttagcgctgttgatacgcaggccggaagacaggcgctgcatggaagtggccagggcgccgccagctttgttcaggttgccctgagtagtgatcgaagcaatgttggtgtttactgttaaagccatgacgaaatcctcgttggatggatactgcggcttccggccctggcaaccgccgggtgtggcctgagaacctacgtaatagttatcgtcgtggtagccggttgcttgaggatttttttcgatttttttgctggcgtcgtgccaccccttgtaattcaagggcttacgcaggcaaaaaagcccgatttcattggcttttctggcgccaaataaaaaacgccgatgctctttcgagcatcggcgtttttttgtgctagcggttcaaggtgtcacgggcgatagagaatcgccgagccccacgacaggcccacaccaaaaccgctgatggccacgcgtttccaggtggcgtccatcacatgcttttccagcagcagcggaatgctcgacgacacggtgttgccggtctcgaccatgtccttgatgaacttgtccaccggcgcatcttcaaaacgacgcgccacggcgtcgacaatcgccgcactgccctggtggatgcagaaggcatcgatatcgtcggccttgaggtccgactcatcgagcagctcgtgcaaatgcgccggcaccttgagcaaggcgaagttgaacacctgccgaccgttcatgaagaacacaccgtcgctgactttaaggtgcggggcgccggaaccgtcggtgccgaacttggacttgccgagcaaccacggcgcgtcttcgcccatccaggtagccgtagcggcatcgccgaacagcatggtggtgttgcggtcttccgggtcgacgatcttcgaatacgggtcggcggtgaccagcaggccattcttcaggccagcggcttccatgaagcccttcatcgcgtagatgccgtagacgtagccggagcagcccagggaaatatcgaaggcggcgacgtgggtcggcaaaccgagcttgtcctggacgatggcggcggtgtgcggcaggccctcttcgtcgccgttctgggtgactacgatcagcgcgtcgatcgactcgcgcttcaaatccgggttgttggcaaacaaagcgttgaccgcctcgacacacagatcggaagtttcctgcgcggcttccttgcgcggcaggaacgccgacccgatcttgccaatgatgaattcttcatccttggcgaatttggcaccctgggcgtagttatcgatcccgtctgccggcacgtaactggcgatgctttttatgccaatcattgtggcttcccaatactaaatagctggagaacacccctgggactacgcccggagtgctgacaataaaggggataaccccataaaaatctcgctgaaagccgccacgtaaggaccctgtgacgacttatccttttcacacgatacagtgaagatgcgctttatgactcacaggtcactcaattgtgtgtgctttatgcaaaaccttcaaacaattaaaccccagaaacgacaacggcccgccgtgtttccagggcgggccgcttgacgtgaagccacttacatcttgttgaacaggctcaactgcgagattttcacgaaggccagctgggaggcttgcagcatggtttgctgcagcgccaggttgatggccgcttcacccatgtcgatgttggccagatcactcatcgtgctggtcgtggcaatgctgatgcttgagttctcactggcctggatctccaaggcattctgccgcgccccgacggaaccccgcacattgacgatctgggacatcgaattggccaggttggcgatggccgagttcatggcatccttgagcttgaccgtcgctgccgggttgccgtcggccggcgcctccagcgccttgcgcaactggcccagggtatccagcgcattctgggtcttctgggtattggcacccaccgagaactgatcgcctggctgcggcgggccgctgctcacgtcaaacgtcacgccggccgccgtcaccgtggtaccgccgccggtatcgccggtggcgatcgccttgctggcgctcgaatagggctgggcatacacctcataggccgtcgcgctggtgaacttgatgatcgccccgctgttggacgggaacgtgctggcatagtccgcctgattggtgacctgggcgccggtcaactgtgcgctcgacgcattgctcggcgtacgcgacacgctgaacgtgtctggcttggcctccaggctgaaggtgcggtccttgaccaacgcatcggagttggcgcccggcgccacgtcaccgaggttcatggtgatatcgaacttcaccccccgcagtgcaacgctggtgctgccttccttggtggcgtcgaacgtgccattgcccggtatctcggaagtcacgtcattgccgttcttgtcagacaccttgtattgcgtgctgctggtaaaggtcagcttgtaaggctggccgtcggcgaatttgttggcgtagtcgccgctcgatgtcaccagcccggccgagagcgccaccttgtggtcattgaccgtaggtggcacggtctgcgggttcggcgcaacccagggggcctgggtgcgaccggcgttagccgcaccttcaaggatggtcttgccggtatcacccgcgctgacattcagcgtattggaaatctgcaggctcagcggagtttcatcaccctggtagctgtaggtgccatcgttgttgcgcgcatacggcggcgtctgggtcttggagccggaaaacaagtagttgccggccgagtccttgctgttgagcaggcccaggacctgatcttcaatcgcaccgacctcactggcaatcgagcgacgatcagcatcactgccggcaccaccggccttgagtgccagctccgtggcacgctgcatggcttcactgatcgcacctaaaacactctcttcgttagtcagcgagtttttcaggctggtgatgttgcccgtggactgggccactatgtctttttgctgctgcagcatcaacaaccgcgccgccgccacaggatcatccgcggcggtctgtacacgcacgccggagctggcctggtcctgggccttgaccacacccgaatagttatccgaatacttggcggagctggtctcgaaatactgctgtgtagaaatacgcatcgtcccaggctcccttaaagactattgatcaatgtgctgaaggtttcttgcgcagccttgatgatctgcgacgacgccgtgtagtactgctggaacttgatcatatcgcccgcctcttcgtccaggttgacctgggacactgagttgcgcgcgttcttgttggcggtcagcaatgcattcgtcgcggtgctgtcggtaccggcagccgcagccttggcgccaacggtagacaccaacttgctgttggcccccaccaggctggtgccgccagtgccatcagcggccgtgccgatggttgccttggtctgcaggcttagcaggtcaagggcgttgcggttgtcggacttgccggaggcattgaacgagaacgtcgtgctgtcgccgttggccggcgaaccgcccaccgtggtgtcgaaactgaaactcttggccggcaccaccaaggcaccgttggcatcgcgcatcggcacgttgaccgtgaccttgttgccctgccccggaacaatgctgccggtgccgatcgggttgccctgggcatcattgagcgtgtacggctgggtgccatcggctgccggcttgccgaacaccatcttcaccggcatcgagtgttcaatacccgtgcgcaattgggcagtggcggcgccgccctggatatccaggggcaccgtcagggtcggcggggtaaacgtgccggtgccctggttggtcttactggcttgcccggataacggcgcagcaaaggcgatcttgttcggatccgtcagcaccgtgccaatgtccttggcaccattggcggtcggactgaccttgaagctgtccccggtggccatcggccccttgccatcgagcgccaaggtgaaaccatcgatcacggccggtggcgtggccgtgacgtcaaaggtccccatggccttgccatcggaacgcaccacggtgacgttgttcgggttggcgctgtcgctgaaggtgaccttgtaatcgaaattggtcagcttgctgctgtccttgatcgtcacgttcaggttgccggaacccgcgctgttgtcacccgaagcctggctgcgctgggcaatggcggcggcgctgttgatatccttgaacagcgagctgccgaactgactattgaggtcaaggccctggcccaactggttgttgatggtgtctgcggtggcgatggcaatgcggcccagatcattgatggcaggcatcagcgcatcggtgcgatagcgcaacagaccgccgatgctaccgccgctgagcacgttgcccaggtcgagcgactcaccgccgccaacgttgagctggatggtgaactggctggtgtcgttcttgctcggtacggcggaaatcgtgttggactggtcacccagtaccagcgactggccggaaccggtgctgacactgaacacgccattcttctcggtggcggtcacgccgaccaattcgttcagcgaacgcacggcttcggcacgtgcgtccagcaggttggccggggccgtgttcgacgagccctgcacctgggcgatctgcttgttgagcgaggcaatggacgaggtcagcttgttgacctggtcactcatcgagctcaactggccgttgatggtttctttctgctggcccagttgcgtagagatcgagttgaagcgattgctcagcgtctgcgccttggtgatcaacacctggcgggccgagacatcgctcgggttggccgaggccgtctgcacggccgagaagaactcactgagcacagccgacatgccggtggtcttatccgacagggtcttgtcgacggcgctgacctgatccaggtacgccttggcatcgctgttgagcgaggtgctgttctggtacgccgcgtcgaggaactcgttatacacccggcgcacatcggccagggtggtaccgctgccgatgtacacaccgccgtactggttcgccgcgctggcattctgggtggtctgctgacgcgagtaacccggagtgttggcgttggcaatgttgttactcaagaccgacagcgatccttgagaggcgttgagccctgacatcccgatactgagcaaactcatggttcagaccttataaatgtgtggttgcgccagcggcagcgtaattctggtaactgtccatcgttttggcgatctgcgaaatcttgctggcataggccgggtcggtggcgtaaccggctttttgcaactcacggacaaactgttccgggttgtcggccgatttgatgacttctttatagcgatcattgctttgcagcaaggtcaccaggtcatggaagctgtcctggtaggagttgtaggaacggaactgcgccgtttccttgaccatcgccccatcgcggaactcgctggtgatcgcacgcgcctggccgccctgccaactctggccggccttgatgccgaacaggttgtggctgctgctgccgtcttcggcacgcatcaccgatttaccccaaccggtttccagcgcggcctgggccaccaggtacttcggatcgacaccgatgcgcgcagcggccgccttggccatcggcaacatggtggcgacaaattcatcctgcgaactgaaggctttcttcgccggcgccaacggtggctgggctacggcgcggccgtagacctgcatgcgcccgctcggcacggcgaaggtgcgcgcgctgctgttgatcacgttgtcatcggccacgctgttgcgcagcggcgcgcttttggcgtcaatcgcgacaggtgcgttcggtacgatgccggccagcaggcgatcggtcagcttgctcggcaaggcgatacggcgctggttcatcaattccatgtcattgctgtgggacgccgcagcgccagcctgaggctcagcaacacggtaagcccacagcggacgctggccattggagcggcccagcggcccttcggcctgggtgcctgccgcaatctcggtcggcacatcgactttcttctcaggcgtggtgcctgccgggccctgcaaggtggcggcctgggcctccaccggcttgttcttctgcatctggcgcatcagcacgtcggccaggccgatacccccgccttcacgggacatcgaaacggccaactgctggtcgtacatttcctggtactgcttggccgccggcgtgttcatcgggttgtctttacccagcgcctcggtggccgaacgcatggacttgagcatttcgctcaagaacagcgattcgaactcctgcgcgaccttgcgcatgttgccttcgctgttcttgtcggcaccgaccttgagctggttaagccggttcaggtcggaataagaccccgagtccgccgtgctgctgatcccgctcttgcgcatatccatggccatggcctcagatcacgatcaggtcggcttgcaaggcgccggcctgtttcaatgcttcaaggatcgccatcaagtcgccgggcgctgcgcccacctggttcaccgcgcggacaatctcatccagggtggtgccggggccgaacttgaacatcggcttggcttcttgctgggcattcacccgcgaacgcggcaccaccgccgtctggccgttggacaatggccctggctggctgacgatcgggtcttcggtaatggtcacggtcaggctgccgtgggtcacggcggccggcgagaccttgacgttctggccgatcacgatggtaccggtgcgcgagttgatgatgactttggctacagcctggcctgggtcgacttcaaggttttccaggatcgacagatagtcgacccgctggcttgggtccagcggcgccgtcacgcggatcgagccaccgtcgatggcctgggccacgcctgggccgagcatgtcgttgatcttgtcgaccacgcgcttggcggtggtgaagtcggagcggttgaggttcaaggtcaggctgttgccttggttgaaaccacttggcacggtacgttcaaccgtggcgccacccgggatacgcccggccgacggcacgttgacggtgatcttcgagccgtcgcgaccttcggcgtcaaacccgcccaccactaggttgccttgggcgatggcgtagacgttgccgtcaatacctttcagtggcgtcatcagcaaggtgccgccgcgcaggcttttcgagttaccaatggacgacacggtgatatccaccacctggcccggcttggagaacgctggcaggtcggcgctgatcgacaccgccgcgacgttcttcaactgcacgttgcccgagcccgccggcactttgatgccgaactgcgagagcatgttgttgaaggtctgcagggtgaacggggtctgggtggtctggtcacccgtaccgttgagccccaccaccaggccatagccgatcaactggttggaacgcacgccggagatgctggcgatgtccttcaggcgttcggcctgggcgacagcgctcaaggaaagcaggagtgcggccgccatcagctgtttgaagttcaaagtggccacctagaaagggaacagcgggctaaggaagaaacggtcgaaccagcccggctgactcgcatcagcaaacgaacccgtacccgagtaggtaatgcgcgcatcggcaatgcgtgtcgacggcacggtgttgtcggtggagatgtcatcggcgcggaccatgccggcaatgcgcaccaactcatcgccggtgttgagggtcatccacttttcaccgcgaatggcgatgatgccgttgggcaacacgtcggccacggtcacggtaatcgaaccggtcaggctgttgccctgccccgccgcgctcttgccgttggtggcacggtcgccgctgtagccggcgctaaggctcaagtcaccactgcccaacgggttgttggtgttaggcactgcgccaaacaacgaggtcaggccgataccggtcttgctggtcttgcccacctgggagttggcgttcttgctggcctgagtcttctcgttcagggtgatggtgatgatgtcaccgacccggaacgccttgcggtcgctgtacaggttctgttcgaaaccggcctggtagatcgagccattgttggcggccgctggcaacggcgtgcgtggcaacaccggcgcatagtacgggtcattgggttttggcgtcggggcgacacagcccgcgagcacggtaatcccactcaatgccagaacagaaacatagcgattcatgacccttacctcacggtgttgcaggcgccctcaagagcgccccatagacttgattacagattctgcgttacgaacgaaagcatctggtcggcagtggagatcaccttggagttcatctcgtacgcgcgctgggtggtgatcatgttgaccatctcctcaaccgtgctcacgttggaggtttccagggtgctttgcagcgtggtgccgaaaccgttcaggccaggggtgccgatttgcggcgcgccgctggaggcggtttccaggaacaggttgttgcccatggcttgcaggccggccgggttgatgaagtcagcggtctgcaggttgccgatcacttgcgacgcggggttgccggccacggtgatcgacacggtgccgtcgttgccgacggtgaaggtcttggcgtcggctggaacgatcacggccggctccagggcgaaaccgttggcggtcacgatctggccgttagagtccaggtggaaagtaccgtcacgggtgtaggaagttgtgccgtccggttgcaggatctggaagaaaccgcggccgttgatggccatgtccagcggctggccggtttgctgcaggttaccggcgctgaagttcttctgggtgccgacgatctgcacaccggtacccaattgcaggcccgacggcagttcgctgtcctgggtcgactgggcgcctggctgcttcttgatctgatagagcaagtcctggaactcggcacggtcacgtttgaaacccgtggtcgacacgttggccaggttgttggaaatggtggtcaggttggtgtcctgggcggacaggcctgttttggcaacccatagagccggaagcatgctgttctccttcgtgcgcctgtttgttggcgctgcgccgcaaaattagtgtgttggatcagctcatctgcatgacgcgcgtcatggcctgatcgtcttctttagcgctgttcatcatcttgatgtgcagctcgaactgcttggaaagcgccagcaccgcagtcatttcttccacggcattgacgttgctcgcctgcaggaagcccgaggtcagcttgacgttcgcgtcggcctgggccggctggccatccttggtatggatggtgccgtcgaggcccttattcatgttcttcaggtccggctggaccagcttgatgcggtccacttcagccatcacccgcgggccttcgcccatggcgcggatgctgatggtgccgtcggaacccacttcgattttctgctggggcggcacggcaatcgggccaccattgcccatgatcggcataccgttgccggcgcgcagcacgcccaatgcatcaacgttcatgctggcgctgcgcacgtaggcttcgctgccatcaggggtctgcacggccatccagccatcgccgttgacggccacgtccaggtcacgaccggtctcgatcattgcgccaggggtgaagtcggtggccggacgctcagtcatggcaaacgcccgcgccggaaagctgtcgccgaacaccggcatcgaacgcgcctgctccaggtcacgttggaaaccattggtggaaatgttcgccaggttgttggcatgggccttctgcgccagagcattctggctggcgccggtcattgccacataaaggtacttgtccacgcttcttcctctttctgacggacgcttgccgcccaccgctgtactgatgaggcttaagcaatttgcgaaccaacttttgaaaagagggagaagtgcaggcggggcgggggtttgccgtgaggtggggggatttcagggttgagcgtgagtcgaaaaaacggcggactactgccgcctgcggcaagtcccgtccttgaaaacgacaaagatcaaatgtgggagggggcttgcccccgatggcggtggatcagccacatcacagctggctgacactctgccatcgggggcaagccccctcccacatggggttatttatcggtcttgaggatttcgtaatcgcgcagcttattcgcgatggtggtgtgcgacacccccagacgcttgcccatctgccgactgctgggatgctcggcatacaaagcttccagtaccgccttctcaaatcgcccgacaatctcatccaggccaccctccagcgaaaaatcgccaagcggctgacgcacgccataatccggcaaccggatatgctcggccttgaccgtcccgccgtcgcacaacgacaccgcctggaacagcacgttttccaactgccgcacgttgcctggccagtggtagtgactcaggcgctccatcgcggcgggcgccaacctgggcagcgggcaaccgatctgccggctggcctggtcgagaaagtgctcgaccaacggcgccaggccatcgaggcattcgcgcaatggcgggatatgcagggacagcacattgaggcggtggtagaggtcctggcggaattcgccacgggcgcacagctcggacaaatccacttgggtggcgcagatcacccgcacatccaggtacacctcttcatcgctgccgacgcgacggaagcagccgtcctgcaaaaagcgcagcagcttcacctgcaagcgcgcactcatttcccccacaccgtcgagaaacaacgtaccgcccgccgtcagctccagcaggcccagcttgccttcagccctggcaccctcgaaggcgccagggccgtagccgaacaactcggtctcggccatcgactcaggcaggccggcgcagttgagcgccatcaacggtgattgcccacgcgggctggccaggtgacaggcccgcgccagcagctccttgccggtgccggtttcgccttctattaatagcggcgcatccagcggtgccatgcgtcgggcttcgcgcaccacggcggccatgactctggagctttggaagatgctgtcaaagccacgcagttcctgcttgcgcacgttgtagatgcgctcaccgacgcggtcggcgcggtgcagggtcagcacagcgccggccatggcctcgctgtcgtcatgctcggaggattgcagcggcgcgatgtccgccaggaacacgtcgcccttgaccttgacccgcaggccgttgattcgcgacttgctcgcgcgcaccagctccggcaagtcaaagtcctcggcgtagcgcgacaacggaatgcccggcacctcatccacccgcaccccgagcaactgcgccgcggcgcggttggcagcgacgatggaaccgcccatgtcgatggacaacaccggaaactccagggcacccagcagtgcattgagctccatatgccggcgctcgctgggcatcagccctaccctctttacgccaaacaccccggcaatcgcctcgaattgcgggcgcagcgcctggaactgcatgttcaccagattcggacaaaacaggtagatggcattgccatgctcaccgccgacctcgcccttggcgacgttgacgccgtattccaccagcaggttgaggatgtcccgcaggatgccgatgcggttctggcagtgcactttgatacgcatgaagaggcccgaaaagtggggaggcgccgcgtctttttgtcgctgggcgcagatagtcgtcaagattatgtgacagccacagcgactttcccagcccaatgcagcggtcaacctcacaagcgtaacgaatagtttacgaaaagcagtaatttttcctacatagaggcgttttaaacagatggaatctggccccgcacgggttatcaataggctcatcgcaggacataacaagaacgaatgcctagcaggagagccgtatgaagcagacgcagtacgtggcccgcgagcccgatgcgcaaggttttatccactacccgccggaagaacacgcggtgtggaacaccctgatcactcgccagttgaaagtgatcgagggtcgcgcctgccaggaatacctggacggcatcgataaactcgacctgccccacgatcgcatcccgcaactgggcgaaatcaacaaagtgctggccgacaccaccggctggcaggtcgcccgtgtgccggcgctgatccccttccagaccttcttcgaattgctcgccagcaagcagtttccagtggcgacctttatccgcacccgcgaagaactggactacctgcaagagccagatattttccacgagatcttcggccactgcccgttgctgaccaacccctggttcgccgaattcacccacacctacggcaagctcggcctggcggccaccaaggagcaacgggtgtacttggcgcgcctgtactggatgaccatcgaattcggtctggtggacacccccgaaggtcgacgcatctacggtggcggcattctgtcgtcgcccaaggaaacggtgtacagcctgtcgtccgagcccgaacaccaggtgttcgacccgctggaagccatgcgtacgccgtaccgcatcgacatcctgcaaccgctgtacttcgtgctgcccaatctgaagcgcctgtttgaagtggcacaggaggacatcatgggcatggtcgagcgcggcatgcagttgggtctgcacgcgccgaagtttccaccgaaacccaaagcggcttgaaccttacatcttcaggccaggtgagtctgttccctggccgcgcgttgctttagggtgacgctactgatcttcaaacactcgaattcaggacaccatcatgaccaccttgaaccaagcccattgcgaagcctgccgcgccgatgccccgcaagtcagcgacgaagaactgccggtactgctcaagcagatccctgactggaacatcgaagtgcgcgacggcgtgatgcaactggaaaaggttttcctgttcaagaacttcaaattcgccctggcgttcaccaacgccatgggtgaaatctccgaagccgaaggccatcacccaggcctgctcaccgagtggggcaaggtcaccgtgacctggtggagccactccatcaagggcctgcatcgcaacgacttcatcatggccgcgcgcaccgacgaagtggccaaggacgccgagggccgcaagtaatgcacttcgatgccattggccgtgtacccggcgacccgatcctcgggctgatggacctgtacgcccaggacgccaacccgaacaaattcgacctgggcgtgggcgtctataaagatgaccagggcctgacgccgattccacattcggtgaagctggccgagcaacgcctggtggacacacagaccaccaagacctacatcggcggccacggcaatgccgcgttcggcaagctgatcagcgagctggtgctcggcgccgactccccgctgctgcgcgaccggcgtgccggcgccacccagaccccaggcggcaccggtgccctgcgtttgagcgccgattttatcgcgcaaaacctgccgggccgtggcgtatggctgagcaacccgacctggccgatccacgaaaccatcttcgccaaggccggcctcccggtcagtcattacccctacgtgggcgctgacaatcgcctggacgtggcggcgatgctcgccagcttgtccagcgtgccccagggcgatgtcgtgctgctgcatgcctgctgccacaacccgaccgggttcgacctgtcccaggatgactggcgccgggtgctgcagatcgtgcgcgagcgccagttgctgccactgatcgacttcgcctatcaaggctttggcgacggcctggaacaggacgcctgggcggtccggctatttgcggccgagttgccggaagtgctggtcaccagctcctgctcgaaaaacttcggcttgtacagcgaccgtgtcggcgcgctgatcgtctgcgcggcggatgccgagaaactgacagacgtgcgcagccaactggcgaacacagcgcgcaacctgtggtcgacgccgccggaccatggtgcggcggtggtggcaacgatcctcggtgatgccgagctgaaaaagcagtggagcgatgaggttgaagccatgcgctcgcggatcgcacacctgcgctccggcttggtggaggcgttggcgccacacggtctatcggagcgttttgcgcacatcggcgcgcagcgtgggatgttttcctataccggcttgagtgccgagcaggtgaagcaactgcgtgagaagcacagtgtgtatatggtgagttcgggaagggctaacgtggccgggattgatgccacgcggttgacgctgctggccgaagccatcgccgacgtttcccgctgacgaaacccggaataaatgtgggagggggcttgccccctcccacatttggcttgtgtgcaacttcagccggcgaccatctcggccttgagctgcgcctcttttgcctgcgcatccgccaaccgatacaactcgatactcccatcccagtgctcgatcaacgccgtgcatgactccacccaatccccgcaattgaggtaatccacctcgcccaccttgcgaatctccgcatggtgaatatgcccgcacaccactccatgcaactcgcgtttggtcacctcgtgggcgatggcttcttcgaaatcgctgatgaagttcaccgccgtcttgaccttgtgcttgaggtacgccgacagcgaccaatagccatagccatagcgcgcgcgccaatggttcagccagcggttgagcgtgagggtgaattcgtaggccgaatcgccgaggaacgccagccagcggtgatagcgggtgatcacgtcgaactggtcgccgtggatcaccaacagatgccgaccatcggccgtcacgtgaacggcttcgtccaccagctggatattgcccaggatcagtttggaataacggcgcaggaattcgtcatggttaccggtgacatagatgacctcggtgccgcgcttggccatggtcagcaggcgacggatcacgttggtgtgggcctggggccaatacatgccgccacgcagtttccagccgtcaatgatgtcgccgaccaggtagaccttgtcggcgtgatagcccttgagaaattgcgacagatgctcagcctggcaatcccgggtgcccaggtgcacatcggaaatccacagggtacgcacccgttgcttgcggctgggcttggtgaactcggcactggtcatgggcatccctcgacggtgttttcgcgagcttgcgccctggcgattaatagcccatgacaactgtgcgtcagtctgatgacagcgcctgccggccgcaaagcgttgtagactgccggcttgccgccccggagatcactatgggacccgccctcaccctgcgccattacctcgaagcgcccctcgcccacagccatgatcatgcgcagttggtgttcggcctgtccgggcacctggacctggaagtcgatgggcgtggcagccaggtccgcgaaagcagcgtgatggtgctgcccttctcggcccaccatgcgtgcggcagccgtgatggcagccggtgcctggtgctggatgtgcccaccgagcattgggtgctgcaatcgctgggcgaacatgccgacgccagccgccgcctgctcgaccaaccggcgcggctggccctggatacgcggcagagccagttggtgcaatggctggcgcaaagcccggtgcatgacccgctgatcgtccagcaaggggcggtgctgttgctggccagcctcaatcatccccaggcccaacccctgccgggacggcgcctgccgtacgcggcgttcaatgcgcacatcgagcgccaccttgcgcacccgctgcaggtggcggacctggcgcgtatcgccgacctgtcggtggcacgtttacacgcacgctttatcgccgaatgcgggcaaacgccgatggactacatccgcagccgtcgcctgcagatggccttggacctgctgcgcaaaacgccgctacccatcggtgaagtcgccgatcgcgtcggctacacctcgcaaagcgcctttgccgccgcgatgctgcgtgagttcggcgcatcaccgggggcattgcgccgcaacgcgtaggaagagtcctgcgataaaaaacgcgagccgcacgacagacatccacaccggcgccccactagactgcgcacttgccacccgcttgtctcaaggatcgcaatgactccccgctcagccctcggcgccctgcatatcggcgcattgatgtttggccttaccggcgtattcggcaaactcgcggccgcttcgccggccatcatcgtgtttggtcgcgcggtgtttgccgtggtggctcttgcggtgtttgcccggttcgccagcaacacggcgtggaagacactggaactgcgcgactggcgccggctgctggtgagcggcgtgttgctggcagcgcactgggtgaccttctttatcgccgtcaaggtggccggcgtggccgtcgcgacactgggcttcaccgcgttcccggcgtttaccgtgatcctcgaagggttgattttccgcgagcggatccgccccaacgaaatcgtgctggtggtgctggtcagcgtcgggctggtgctggtcaccccagacttcaacctcgccagcgaagccactggcggcttgctctgggggatcgcctcggggctgttgttttcactgttatcgctgaacaaccgcgccagctccggccgcatccccgcagtgcaggcggcgttgtgccagaacgtggtggtcgctgtttgcctgttgccggtggcggcaccggggctgaccgaagtacgggcaatcgactggctgtggatcggcttgctcggcgtgttctgcaccggcctggcccacagcctgtttgtcgccagcctcgcggtgatcaaggcacgcaccgcctcggtggtgttcgccatggagccggtttacggcatcaccgccgcctggctgctgtttgccgaaacgccgacgctgcgcatgctgctgggtggcgcgctgatcatcgtcgccattgtgctgtcggggttgatgggcagcgccagccaggccaaacagcccactgcaacggcctgatctatactttcaatatccgcaacagtcagcagtcgttcaacggataaccgacagctcgacgacagccagggtgtgttctgaagttgctgcaagcgagtggtcacaacctcaacgcgatgcgggagctttaccatggaaatgctcatcagcttattggtacagatcatcagcggggcggtcggcggcaacgtcgccggcatgaccaaacagagcctcgggaccgggctcaatacactgatcggtggtgtcggcggactggtgttgggtcaggtcgccgcggcattcacgggcacctcgggcggtgaagcgctggatgtagcggcagttggcagcaacattgtggggggtgggataggcggcctcatactgacgtggctggttggcttcatcaaacacaagatggccaccaaatagggctgcactagagggtcaccgcccccaataaggcggtgactttcactgcgtacggtcgttgtgccccaggtcacgctgcgggtcgatcctgtcgcgtacgcgctgcttgagcaccttggcttcggggaaaccaccgtccgccttgcgttcccagatctgcacgccatcgcaggtgatgcgaaacgcgccgccggtggccggctcgagtgagaccttgcccaggtcatcggcaaatgtactcaacagctcctgcgccagccacgcggcgcgcagcagccactggcactgggtgcaataggtgatgacgatctcgggtttgcttgtggacataacttgagaagctcctggcataacgggctcggcggatcgagtggctataataccggcctttatcgcccagccccgagattcctgatgcgccgcctgctgtcctgcctgttgctgtgcctgctccctctgcttgccgacgccattgaagcgccccgcccgaaaatcggcctggtgctgtccggcggcgccgcccgtggcctggcccatatcggcgtgctcaaggcgctggaagagcaaggtatccagatcgacgcgattgccggcaccagcatgggcgcggtgatcggagggctgtatgcgtcgggctacaagatcgatgagctggaaaaactggcgctgagtatcgactggcaacaggccttgtccgacgcaccaccccgcgaagacgtaccgttccgacgcaagcaggatgaccgggacttcctggtcaagcagaaactcagcttccgcgacgacggcagcctgggcctgccactgggtgtgatccagggccagaacctggcgctgctgctggaaagcatgttcgcccacaccagcaacacgcgcaatttcgacaagctgcctatccccttccgcgcggtggccaccgatatcaccaccggtgaaaaggtggtgttccacaagggccacctgccccaggtgatccgcgccagcatgtcgatcccggcggtattcgccccggtggaactggacggccggctgctagtggacggcggcatgaccgacaacatcccgctggatgtggcgcgggagatgggcgtggacatcgccattgtcgtggacatcggcaccccgctgcgttcgcgcaagcaactggccacggtggtggatgtgctcaaccagtccatcaccctgatgacccgccgcaattccgaggaacaactcaaggacctgcaccccaaggacgttctgatccagccgcccctcgccgcctatggcgtgaccgacttcggccgcgccaaggacatgatcgacgccggctaccgcgccacccgcgcccttgacgtacgcctggcccacctgcgccctgccgagccggtcgacccgcaattggtggccgcccgcacaccgggcgaacgcaccccggtgatcaccgcgatcagcgtagagaacgattcgaaagtcagcgacgacgtgatccgctactacattcgccagcccctgggcgagccgctcaacctgggccgcctgcaaaccgacatgggcaccctgtacggcctggattatttcgagcaggtgcaataccgcgtggtcaagaaaggccaggacaacaccctggtaatcagcgcgcggggcaagcgcagcggcaccgattacctgcgcctgggcctgaacttgtcggatgacatgcgcggcgacagcgccttcaacctcggcgccagctaccgcatgaatggcatcaaccggctcggtgcggaatggctgacgcgggtgcagatcggtgaccgccaggagctgtacagcgagttctaccagccgatggacaccggctcgcgctactttgtcgcaccgtacatcagggcccaggcgcagaacgtcgagctgaccctggacaacgacccgatctccgaataccgcctggagcgctacggtttcggcttgaacgtcgggcggcagatcggcaacagcggcgagatccgcttcggcgtcggcgaagcctggggcaaggcggatgtgcgcatcggcgaccgggattcgcccagtgtgagtttcagcgaagggttctatgaattgaaatactccttcgactccctggacaacgtgtacttcccccacagcggcgaagacatcggcctggccttgcgcgaattcgaacctgggctgggctcggaccagcgctaccgccaatgggagttcaagctcgacaaagccatgagccacggcccggacaccctggtgctgggtggacgctacgggcgcaccctggatgattcggatgtggtgatttcaagcttcctgctggggggcgcgcggcagctctcaggcttccgccaggatgcgatctcggggcagaacatcagcctgatgcgggcggtgtactaccgcaggctcacgcctcgctcgtacttgccgctggatttcccgctgtacctgggtgcgtcactggagcgcggccgggcatggaacaacgacaatgaattcgacagcggctatatcaatgcggcgagtatcttcctggggttcgatacgccgttggggccgctgaacttcagctatgggttcaacgatgataaccagaaggcggtgtatctgaacctggggcagacgttttagcgttttgctcagaacccgattgcgtagagcggcgctgttgtggcgagcgggcttgccccgcgctggggtgcgcagcggccccaaaaacagacgactgatttctaactgaaaaaacgcggtgactttagtggggctgcttcgcagcccaacgcggggcaagcccgcttaccacaacagccctactcaccacagtaagacagcacagtggtttcttcaggacttttccagattcgccaggatgtgcccatgcacgcgcatgcacacgctcaagtcggcttcgtctacccccacaaacagttcgtggcgcagggcggtggcgatggtttcgatttgttcgatcaagggccgggcggtatcacacagcacgatgcgcttggcacgacggtcttccaccacggcctggcgttgcaccaggccttggccttcgaggctgtccagcaggcgagccagtgtcggcccttcgacaccaacgctttgcgccagctcacgctgggtgggtgcctcttcaaaacgagccaagtgcagcagaaccagccagcgcgcttgggataaaccaagccccgccaaacggcggtccagctcggcgcgccacccacgggacatttgcgccagctgcatgccaaaacgatgttgatcggttaacgacataaaaaactcaatgtttagactgaaaataaagtgtggctaattattagtcagctaagcatgagctttgcccgtaggcaagagttgctatgtactgattcgttacattgtcgtaattggcacactaaatttcgaattcggactgcaaagccgcgcgcacgcagtacaaaaccccctctggaacacgcccggtgaacagcggcgctatctccgcaacaggtggcaattcgccctctccgtcgaggaacgcatcctggatttcgccgagcagatcctccggtaaatcaagggcttgctccaacgacaattgctgcttgccgatggattcggcaagcaaggtgtagacgtttttttctgaacattgcagctgaccggcgatctgcatcggggtcatgccggcgcgtgccaggctgatcagttcgtggcggatatcagcgacctccttcggcgcttcggcctggccgccgagcacttcgaggaacgcctggccgtaacgctccaacttgcgcgcacccacgccgctgacccgcgccatctcggccatggtggtgggttgttcgcgcaacatttccaacagcgtcgagtcggggaaaatgacgtacggcggcacgctgtgttcctgtgccagtttgcgccgcagggtgcgcaaagcttcccactgctcgcgctcctcgccacgcaccagttggctggcctgactggtgctggtcttggcggtggtctgcggcttgaggtcgcggcgcaactccaggctgacctcacccttgagcaacggccggcaactgtcattcaagcgaaggccgccgaagccttcgatatcgatgtccactaggccgcgcgcaaccatctgtcggaacaacgagcgccactcgccttctgcgcgggccttgccgacgccatacaccgaaagtttctcgtggccaaagctgcgcactttctcgttgtccttgcccagcaagacatccaccaagtggcccacgccataacgctgaccggtgcggtagatggcggacaagccctggcgcgccggctcggtggcatcccaggtctgcacgccatcgacgcagttatcgcaatgaccgcaaggttcgggcatgtcttcatcgaaatatgccagcagggtctggcgccggcagcgggtttcctcgcacagcgagagcatcgcgtcgagcttgtgctgttccaggcgcttgtgacgctcgtcgccctcggagttctgcagcatctgcttgagcatcaccacgtcctgcaggccatagaccatccaggcatccgccggcaggccatcacggccggcgcgaccggtttcctggtagtacgcctcgagggatttgggcaggtccatgtgcgccacgaagcgcacgttggatttgtcgatgcccatgccgaacgcgatggtggccaccatgatcaggccttcctcgttgaggaaacgcttctggtgcgccgaacgcgtttcgttgggcaggccggcgtggtacggcaacgccgggtagccttgctcgcagaggaatgcggcgacttcatcgactttcttgcgcgacaggcaataaacgatgcccgcatcgctgcgccgttcggagagaaacgccagcaactgcttgcgcggctgttccttgggcacgatgcgatagaagatattcggtcggtcgaagcttgagaggaagcgctcagcgttctgcagatgcaggcgctcgacgatttcttcgcgggtgcgcttgtcggcagtcgcggtcaacgcaatgcgcggcacatcgggaaacagctccgccaactggccgagttgcaggtactcgcggcggaagtcatggccccattgcgatacgcagtgggcttcgtcgatggcgaacagggcgatttccaggctctgcaaaaacgccagcatgcgcggctgtaccaggcgctcgggcgccagatagagcatcttcacttcaccgcgcttgatgcgagcggccaggtcacgctgctgttcggcactgagggtagaattcaacgatgcggcggcgacacccagctcttccagggttgccacctggtcgtccatcaatgcaatcaaaggcgataccaccaccgccaagccattgcgcaacagtgccggcacctggaaacacaaggacttgccgccaccggtaggcatcaggaccagtgcgtcaccgccactggccacgcgctcaatgatcgcaccctggcggccacgaaaactgtcgtagccgaagatgtccttgaggacgcgttgagcctgctcgagcatgtaaaactccaaaatggtgccgaaatccctctgtacaggctggccgaaaaaacacgctttcacgggaaataatccgtaagcgaagttttcgcgggctggcgcttggcctgcaagggcatcacaaaacgcggcagtatacccgagcgatccccggcaaagggcatcactgacgaatagcggccgcgatctaaaatgccgtgcggctggcctgggcgctcaagaaagcctagaattcagcatcgtttattcccaaggtaactcttcaatgtccttcgctgagcaactaacccgcctgcaagccttcctcgacgccgatgagctgcatgacgaggcgctggactacgtggccgcccacggctacctgaccgccttgtcgatctgctccgaggtcgtgcctgaccgtgaatggatcgatgcgctgttcgccgaagagccgcactacaccgacgccgcccaacgcgaagaaatcgaagccaccctgctggccctcaaggcccacatcggtcgccaactggcctccgacgaagagttcgagctgccgtgcgaactggaccttggcgaagagccggatgattccgacctgcgcggctggtgcattggcttcatggaaggcgtgttcctgcgtgaagccgcctggttcgaaaccgccgaggaagaagtcagcgaaatgctgctgccgatcatggtcggttcgggtctgttcgacgaccagccggagttctccgacatcgccgccgacgccaacctgatggacgacatgatcgtgcagatcccggaagccctcaccgcgctgtacctgctgtgcaacgcccctgacgaaaagccggcgatcctcaagccacgtcaccactgagtcgcttgcccgtgacacccatgggcaaccgtccgctgctcctgcgctacctgctgctggccattggttggttgagcgtagcgctgggggtgatcggcattttcctaccggtattgccgaccacgcccttcctgctgctcgccgccgcctgcttcgcccgaagctccccacgtttctaccactggttggtgcagcacccgcgccttggcccgtggatccgtgattacctggacggcaacggcatcccgctcaaaggcaaggtctacgccatcggcttgatgtggctgagcatcggcgtgtcctgctatttagtgccattaccgtgggcgcgcggcttcatgctgaccagcgccgtgctggtgacaatctacatcctgcgccagaaaaccctgccaccgcgctgaatgacctgcgacattcgatcccacacgaccttggtcgacactgactaaccccaagcatcatgcgagactgtccaaccgggcctggaatgcccgggtgttcctatgctcggagttaccatgtcgctgtccagcgggctgatcgccgccgttgccctggcctatatggccattatgtttgccatcgccttctacggagaccgccgccgtgcgccactgccgccgcgcatgcgtgcctgggtgtacagcctgtcgctggcggtttactgcaccagttggaccttctttggcgccgtaggccaggccgccgaacagctgtgggcgtttttaccgatctacctgggaccggtgctgctgctggtcctggcaccctgggtgctgcagaagatgattctgatcagcaagcaggaaaacatcacctccatcgccgacttcattgccgcgcgctatggcaaatcccaatcgctggcggtggtggtcgcactcatctgcctagtcggcgtattgccctatatcgccctgcagctcaaaggcatcgtgctcggggtgaacctgttgatcggcgctggggccgacaccaccggcacccgcgcccaggacaccgcgctgatcgtgtcgctggtgctggcactgttcaccatcgtatttggtacgcgcaacctcgacgcgacggagcaccaccgtggcatggtgctggcgattgcgtttgaatcgctggtcaagctgttcgcgtttctggcggtgggcgcgtttgtgacctacggcctgtacgacggtttcggcgatttgttcagccaagccatgctggcaccacgcctggaggagttctggaaggagaccgtcaactggccgtcgatggtggtgcagaccggcgtggcgatgatggcgatcatctgcctgcctcggcagtttcatgtcacggtggtggaaaacatcgaccctcaggacctgcgcctggccaaatgggtgttccccgcctacctgattctggccgcactgtttgtagtaccgatcgccttgggcggcaagatgatgctgccgggctcggtgctgccagactcctacgtaatcagcctgcccatggccgaagcccatccggcgctggcggtactggcctttatcggcggtgcctcggcggccaccggcatggtgatcgtggcaagcatcgccttgtcgaccatggtctccaacgacatgctgctaccgtggttgctgcgccgctccagcgccgagcgcccgttcgaagtgttccgccactggatgctgtcggtacgccgggtcagcatcgtgatcatcctgttgctggcctacgtcagttaccgcctgctgggctcgtccgccagcctggcaaccatcggtcagatcgcctttgccgccgtgacccagctggcaccggcgatgctcggcgcgctgtattggaagcaggccaaccgacgcggcgtatttgccgggctggcagcgggcactttcctgtggttctacaccttggtcctaccggtaacggcgaaaagcctgggctggtccctcagccttttcccaggactgacgtggatgcattcccacccactgggtctgtccgtcacttcgttgaccttgggtaccgtgttttctctggcaggtaacttcacgctgttcgtatgggtatcgatgctgtcgcgtacgcgggtttccgaacactggcaagccgggcgttttattggccaggaaatcagccaacgcgccagcgcccgctcgatgctatcggtgcagatcagtgatttgctcagcctggccgcgcgctttgtgggtgaagaacgcgcccagcagagttttatccgcttcgcctatcgccagggcaaaggcttcaaccccaaccagaatgccgacaacgactggatcgcgcacaccgagcgcttgctggctggcgtactcggggcgtcctcgacccgcgcagtggtgaaagccgccattgaagggcgcgaaatgcagctggaggacgtcgtacgcatcgccgacgaagcatcggaagtgctgcagttcaaccgcgcattgctgcaaggcgctatcgagaacatcacccagggcatcagcgtggtcgaccagtccctcaagctggtggcctggaaccggcgttacctggagctgttcaactacccggacggactgatcagcgtcggccggccgattgccgacatcatccgctacaacgccgaacgtgggttgtgcgggccaggtgaggccgaagtgcacgtggcgcgacgcctgcactggatgcgccagggtcgcgcgcacacctctgaacgcttgtttcccaatggtcgtgtgatcgagctgatcggcaacccgatgcccggcggcggcttcgtgatgagtttcaccgacatcaccgcgttccgtgaagccgagcaggccctcaccgaggccaacgaaggcctggaacaacgggtgaccgagcgcacccacgaactgtcgcagctgaacgtggcgctcaccgacgccaagggcgtggccgagtccgccagccagtcgaagacgcggttcctggcggcggtcagccatgacctgatgcaaccgctgaatgccgcacgcctgttctccgccgccctctcccaccagaacgacggcctgtccgacgaggcccggcaattggtgcagcacctggacagctcactgcgttccgccgaagacctgatcagcgacctgctggatatctcgcgcctggaaaacggcaagatcaacccacagcgccagccttttgtgcttaacgaactgttcgacaccctgggcgccgagttcaaggcgctggcccaggagcaaggtctgcgcttccgcctgcgcggcagtcgtttgcgcgtggacagcgacatcaagttgctccgcaggattctgcagaactttcttaccaacgccttccgctatgccgacggcccggtgctgctcggcgtacgccgacgcaaaggcgagctgtgcctggaagtatgggaccgtggcccggggatcccgctggataaacaaaaggtgatcttcgaagagttcaagcgcctggacagccaccagacccgcgccgagaaaggcctggggctgggcctggcgatcgccgacggcctttgccgcgtgctgggccaccgcctgagtgtgcgttcatggcccggcaagggcagcgtcttcagcgtgcgcgtgccgctggcccgcaaccaggccagcccgcaggtcaagacgccgcaggaaaccggcttgccgctgagcggtgcgcaggtgctgtgcgtggataacgaagagagcatcctgatcggcatgcgcagcttgttgacgcgctggggctgcgaagtctggaccgccaccgaccaggcgcaatgcgcggcattgctggctgatggcgtgcgccctcaattggcgctggtggactaccacctggaccatggcgaaaccggtactgaactgatgggttggctgcgcgcgcaattggcggagccgattcccggtgtggtgatcagtgctgacggtcgcccggagatggtggccgaggtgcatgcggcggggttggattacctggccaagccggtgaagccggcggccttgagggcgttgctgagccggcacctgccgttgtaggagacggcaagccggcgcctacaattactcgggcagatgggccacgccatcggagtcggtcatcgcccgctccagcagatcagcgggaaggctcttactggctcgagcaccgagcaacctcaattgctcagtccggctgaccagatttccgcgtccatctgtcagcttgttacgcgctgcgctgtaagccttatccaactgctgtaaacggttacccacttcatccaggtcctggataaacaacacgaacttgtcgtagagccaaccggcgcgctcggcaatttcccgggcgttctggctctggcgctcctgcttccacaggctgtcgatcacacgcagggtggccagcaacgtggtcgggctgacgatcacgatatggcggtcgaaggcttcctggaacaggttcggctcggcctgcaacgcagcggaaaacgctgcttcaataggcacgaacagcaacacgaaatccaggctgtgcaggccttccagacgtttgtaatccttgctcgccagacctttgacgtgattgcgcagcgacagtacgtgctgtttcagggccgcctggccgatgacctcatcatccgccgccacgtattgttggtacgcggtgaggctgaccttggagtccaccaccacctgcttgtcaccgggcaacatgatcagcacgtccggctggaagcgctcgccatccgggcccttgaggctaacctgggtctggtactcacggcctttttccaggcccgcatgctccagcacccgctcaagaatcagctcgccccagttgccttgggttttctggcccttcaaagcacgggtcaggttggtggcttcgtccgacagacgcaggttcagttgctgcaggcgctccagctctttagccagggaaaaacgttcgcgggcctcgttctggtagctttcttccacgcgtttttcgaaggactggatgcgctctttcaacggatcaagcaattggcccaggcgctcctggctggtttcggcgaagcgctgttcgcgctcatcgaagatcttgccggccagctcggcgaactgcgcgcgcagctcatcccgtgagccttgcaggtcagtgaggcgctgttgatggctgtcctgttgttcgcgcagttcggcgcgcaaggccgctgacagagcgtcgaggcggcgcagctcggtctccttggcgctgcggtcgaggttccaggcgtgggcggcgtcgcgggcattgtcgcggtcgatctgcagcagttcgacttcgcggcgtacggccgccaggtcggcctgtttggcagcattcgcctggctcagatcgctgatctcgtcgcggctggcatccaactgtgcggcgaggccctcctgggccagttgcgcagtggccaggcgctcttcgagcagctcccagccggtcatgcgcgcggtcagtcgccgctgaagctgccagcacagcgccaataaaggcacggcagcgcctgcgaggcccagggcaatactggtccagtcaaaaaccatagacatgtctgccatcaccgaaaaaaagcaaggttagcggagcccagggcctgaggacagctcagtcttcgacctggcccagttcacgctgggcgcgacggtcaccggcgcgagccgccaggcgcaacaggtcgtggccgatgcggcggtcacgggcattcccgcactcacggcacatcagttggcccaggcggctttgggcagcgaccacgccttcacgggcgggctgcttgagcaagcgcccggcaaagtgtttgatgttggtgttatgacccaggcgcggactgtcgagcagccacaaggcaactttcaaggagaagcgcttgggggcggtaacagtttgaggggtatcggtaacagaaggtgatactgagcgaaacttcataaagcactgtgggacagatcggaaggcgcgccactctactctttttttcgtacaggtaaagctgaaaaaactctgcacgcccgttctagagcaagcgctcgggacaatccacagaagctgtggataactcagtggacaacccccctttaactcgcgcaaagccccatggaatgggggtcgcagtcaaactgacgattttttcaccaataaaaaaaagccagatttttcattgacttaaatttccattgcaggcaaatggcggcccggtagagcagttgacagcgcggttacacctcccacaactaatgtgcacaagtacccatccgacggttatatcgctggcgttttttgaagcaacttgctgcaaagatgttaccgccggggcaaaacagggacttttcaaatctttcctggctcgccacactccccgacctacagcgcaacggtggaggggtcgatgaaaggaattctgttgttcgcggtgctgctcctggccatctgcgccatttcattggggatcaatgcggcactgccctctccggatggggcactgttcgccatcgccatcctgctgtcggcggcgttcacggctgtgagcttgtgcattgagctcggcgaaggccggatcaacgatatgggtgatgtgatgaaagtggtcgagaccggccagtccctgcgcttgaccctcgccgcctatggcctgggttgctcgctggcagcagcagccactgtgctggtctatcgaggcctgctgggcagctgattgaagttttttggctaacccacttcccttacctgtttcaatccgttactatccgcggcgttagtaccaagctgaaagtcaattctggtcgaacaattcccctgcacaacacgggatcgaccacctcgatggtttccaggtatcacttgcgacgacactgcctttgaacaagcaaagggtgccgcgaagtttccatactctgaccgaaccaacctgcaaattgatcaggatcttcaccctgggcccagaacctttgcccctgttgtgttgcctgccctcctaagtacctacctgccagcccaagcgcgcctaacttaatagcgcttcaaactggctgctttgttccagtcgggttcttcgtttgatcaatggtgatcaacgttactggaacgttttaatacggcacggatcttatttcgtgtcatttgtaggaacacccataatatgaacgctcaaatccacactcaggatgccattcgcaccctaaccaacgcttttgctccaatgaactgcctgatcatggctgcgcgcaaaggctgcttcagcttcaccctggtcaacgaacacggcattgctcgtcacagcgaacgcctgtaccccgatcaatactccagcgcagaaccgctgcaggccgtgatcgagcgtacccgtcaggcattgaccgcctgaccgacccgagtcgctgaaacacaaaaaccctgcttgaacagcagggttttttattgcccggaatttaccggctcagctattgcactaagttcaaatagatataaacattataactaaatgaagaagatgttttaaaaacagtcctttacatcgtaaatatgacactacacttcaactcaagcggcatgatccgcttccggcgagcctgagatccgatccactgctgccaagcccccaccttctcaggcttcgtcgaccactttcacggattgaggcgtgtatgggtatcgctgccagcgaattgtgtcgttatgtgatcaggccgacgttgatgtacctcggccgacataacccgacggccgagtccctgctgctgggcatcgccgccagccagtcggaactgggttccgccttgcacgaccggcgtggccacggcctgtacagcatcaccgaaccgcgccaccgtgccttgtgggacagctacctggcgctggaccccgagcgcgccagcctggtacgcggcctcgctagccaacacgcgttcctcagcgcaccgcaacttgagctcacggtcaacctgcgttacgccaccgccatcgcctggctcctggtggaacagcacacccctgcactgcccccgcccggtgatgtgctggccatggcacgtatctggaaagaaatttttcatccacaaggaaggctgcgcgatttcactcaagcctggcaaacctgtgtttcacccatgaatcaggtggtttgctgaccgggcaatttgcaagattcgccaaaaaaccaggattttggtcggattgtcctacaaaaccgctctatctcctgcattacagcctatagcgcgatgttaaatttattgttactttccgcagcggtgatcaccacggagttctaataatgaaaaaagtaatgctcaagaccacacttagcctcgccgttgccatggcctcttcccacgtgttcgcaagtggctttgcccttaacgaacaagacgtcgcaggaatgggaacgggtttcgcaggccgctcttcttctgccgaaaatgcaagtaccgtttatggtaaccctgccggtatggctcgccttgaaggccagcaagtcactggcggtgttgcagcgattgatgcctcaagcaacatcaaggatgtcagcggccgctccacaggcacgaacaaaggcgatatggtgcctttcactgccgttccttttgggttctacaccaataaactcaacgaacaatgggctgtcggtttcggcgtctatgctccgtttggcctggtgacagactacgaaagtggcttccaaggcaaagcttttggcagcaaaagcgaagtgacggtcatcaccttccagcctacggtgagctacgccttcaacgatcgggtttccattggttttggcccgactatcaaccgtatcgctggtacgctcgagtccgatatcaacctaccagtccctggtaccggcgccaacaacatcaagatcaagggagatgacaccgccgtcggcttcaatgccggcctgctggttcaagccactgatacaactcgcgtgggcctgacctaccactcgaaagtgaaatacaagctcgaaggccatactgaagtgaccaaaggcaccaacgttccggctgcgctgctgaacaatggccgctacgacgcgtcgctgaagatcgacacgcctgaatcctgggacctctcggttactcaagacatgagcgacgcgtggaaactctacgcaggcgctacatggacccgttggagccgactgaaagacattaccgtcaacaacgaaggtgtatcggccgcagccggtagcggtgctttggctccgcaaattgtcggcaccatcaaagaagaccagaactggcacgacacttgggcctatgccttgggtacctcgtatcgcgtcaccaagcaagtggtgctgcgtaccggcctgaccttcgaccagtcgcctaccaacaacaaagaccgttcgccacgtatcccaaccggcgaccggactatcttcagtctcggccttggttacgatgtaatgccgaacatgaccgttgatctggcttactcctacctcaaggaagaaccagtcaaggtcgctcgcgccaacgcattgggccagtcctacaatgctaagtacgagaacagcgccaatggttttggcctgggcgtaacgtacaagttctgatctgacaccgtatgaaaaagccccgctctcctgcaaaggaagcggggctttttaatggctggccctcaaggtttggaggcgatcgcctgctccaccgccttgatcagatccggactgtccggcttggtcaaactggagaaattggcaatcaccttgccctgccgatccaccacgtacttgtagaaattccacttcggcggtgtgtcggtctgctgtgccagtaccttgaacaggtgcaccgcgtccggccccttgaccttctgcggttcggtcatggtgaaggtcacgccgtaattcacgtagcagaccttggcagtctcttcgccggtcttggcttcctgcttgaagtcatcggacggcacgccgatcacttccaacccttggcccttgtaacgttgatacaaggcttcaaggcctttgaactgtggggcgaacccgcagaagctggcggtgttgacgatgaccaggggcttgccggcaaagcgctggcacaggtcgatggattccttggcgcgcagcttgggcaactggccttccagcagcggcgggcaactggcggccagggcggcactgccaatggccatcaggacgggtacagcgagccaacgcatctgcatgtcgtgtgtccttgaaagtaatcaaaccaccaacttaacagatcgacatacccagttgcatcaacgccagcccgccatgctgccagccccaccaggccagcagcaccaggatcagccccgcaacgaggatcacaccgcgtaacgctacattcatgccgcctccatctgcgcctgcaagcgcgccaccggccgctcacgtaccggccagttaagggcggcggcgagcaggctcaacagaatcgccacctgccagatcaaatcgtagttaccggttcgatcatagaccaccccgcccagccagccacccaggaacgaacccaactggtggaacaggaacacgatgccaccgagcatggagaggtttcgcacaccaaacagtgtcgctacggtaccgttggtcagcggcaccgtggatagccacaggaagcccatcgccatgccaaacaggtaggccgtgatctcggtgaccggtgcccacagaaacagcacgatcaccaccgcacgcagcaggtacaagcccgtcagcaggcgcggtttggacatgcgcccgccgagccagccggcggtgtaggtcccgaagatattgaacagcccaatcagtgccagcaccgtggtgccgacggtggccggcaagtgttggtccaccaggtaggccggcaggtgcacgccgataaacaccacttggaaaccgcagacaaaaaagccgaacgccagcagccagaagccggaatgggagcaggcttccttcaaggcttcccgcagggtttgctgacccgccaccgccggtaatggccgatccttgagcatggcgaccagcggcagaatcaacgccaccatcaggccgagcgccagcagggccgcggaccagcccagccagctgatcaaacccagcgtgcccggcaccatcgcaaactggccgaacgaaccggcagcactcgcgatgcccatcgccatgctgcgtttttccggcgccaccgcgcgacccaccacaccgagaatgaccgagaacgaagtgccggacaggccgataccaatcagcaagcccgcactgagggacaacgaccacgccgaatcggacatgcccatcaacactaggccaacggcgtaaagaacaccgccgacaaacaccgctttggtggcaccaaaacggtcggccagcgcaccggtgaacggctgcgccaggccccagatcaggttctgcagggcaatggcaaaagcaaaggtctcacggccccagccaaattcactgctcatcggcgccaggaacaggccgaaaccgtgacgcacgcccaacgacaacgccaggatcagcgcactccccacaagaatccagccactggtgcgccacatcgaggtcatttcttattctccgctcgcgggtatatacccgcttatattcgaaccaacccgcgctcaggcgagttcgtccagcaaggccaacaaggtttcgcgtttttccgcgcccagttgatcgatcaatttctgttgcgctgcctcccaagcgggtaatgcggcggcaagtcgcgcctcaccctctttggtcaacatcaccaggcgattgcgcaggtcgtcgccttccaccagttgcaccaggccctcgccttccagcacccgcaggttgcgccccagggtgctgcgatccaggcccatggcttccgccaggctggaaatgctcggctggtcgagccgttgcaggttgcacaacaaagaatactgggcgacgttgatcccgaagccgtcgagagcgccgtcgtaatgcctgctgacgccacgggcggcacgtcgcaggttggtacacaaacattgggaggcaagcatggaacgtgtatatacccgcgattaaggaaatgcaagaaagtgttacagcgccaggccgaccaacaccacgacttccagcagttccagcaaggcccctgcggtgtcgccggtggtgccaccgaggcgattgaccatcagttggcgcacacccacaaaggcgatcgccgcgagcaataccgcaaccccgccgctgaagccaccgatcaggatgcaggcaagaccactgaggatcagtacctgttggccgacgatcctcggtaaatgatccgacaatgcctggcccaatccaccggcacgcacgtagcgcgtggtcagaaacaacgccagcatcgatgcccggccgatcagcggggccaggatcagcgcggcgccgttgtgttgttcgatcaacgccaccaacgcggtgaacttgagcagcagcaccaagccaagcgtcaccaccgcaatcggcccgctgcgcgggtccttcatgatggtgagcgtgcgctcgcgatcaccgaagccgcccagccaggcatcggcgctgtccgccaggccgtccaggtgcaggccgccactgagcaatacccaggccgtcagcaacagtgcggcgtgcagcagcaatggcgcgcccatcaataggctgttcagcgcccacaacagcacgccgaacaacaggcccacgaccggataaaacagcagcgaacgccccagctcctgaggctgcggcatgccgggcaggcgaatcggcaggctgctgagaaattgcagggcgatccagaagggcagcatgtctacgccccttccttcagcgtgccgtcagctgcaacttggaggctgaacagcccaccatgaccaacttcgacattcaataactgctcccggggcaaaccacgcgcctgcgccagtaacaggcgcatcacgccgccgtgactgatcaacaacacccgctcaccggcatacgcctgatacaggcgtgagacagcccccataacccgctcggaaaaggcgctgaccggctccccgtccggcggggtaaagctataaggatcggcccagaacaaccccagcccttcggcgtcggtctccatcaaggccgctgcactctgcccttcccaggcaccgaagtgcagttcttgcaggtccttctccagcgtcaccggcagctcgagccgggcgcctaattcttcggcaaatcgcgcgcagcgtcgcaacggcgaactgatcaagcggtcccacggcccctgccccaccacggcctcgcgcatctgcgcccagccgttggcggtgagtgcgtcgtccaggctgccacgcaggccgccgcccagctcggtttcgccatggcgcaacaggtcgaggtgcaaggtcatgccgggcggtctgccacggcggcttcggcaaaggtcgccatctgcccgtgcaatgcacaggccaggcgcaacaacggaaccgccaacgcagcaccactgccttcgcccaggcgcaggcccagttccagcagcggctgcgcgtcgaggtgttgcagcacatgacgatggccaggctcggcgccgcgatgaccgaacaccagccactcacggcacgcagggttcaggcgcgtggcgaccagcgcagcgacggtgcagatgaacccatccaccagcaccacaatgccctcctgagcacaggcgaggtatgcccccaccagcgcagcaatctcgaagccgccgagattgaacagggtctgcaaggcatcaccgcgctgagcggcatgcaccgccagcgcgcgttcgatcacggccactttgtggcttacgccctgggcattcaagccggtgcccggccccgtcaggtcactgacctggcagtcgagcaaggcacacgccagcgcactggcggcggtggtgttgccgatgcccatctcgccgccgataaacagctgtgcaccacctgccaacgcacgccgcgcactgtcacgaccgacttgcagggcgagttgcccctgtgcctgggtcatggccgggccgttgacgaagttggcggtgcccgcgccgatattcaggtgccgcacaccgggaaggtccagggacggggtcaccgtgccgaggtcgaccacttccaactgggcgtccaactgccgcgccaatacgctgatggccgcgccaccgctgacgaagttgtgcagcatctgcccggtgacttcctggggaaacgccgacacgccttcggcaactacgccatggtcaccggcgaagatggcgatccacagcgagtccaccgacggtttgacctggccctgcaagccggccatttgcaccgccagcgcttccaactggccgagggagccggccggtttggtcagttgctgctggcgtgccagggcatgttcgtacgcttgagtgtcaatcgccttgcacgggttgagccaccaggtgtcagtcataacgcagtacctttcaaagtcaggggcaggccggcgacggtcaggacaacacgctgacaccgctcggccaaggcttgatgcagccaaccggcttcatccacatagcggcgagtcaattcgcccagcggcacgacacccagaccggtctcgttgctgacaaaaatgatttcacccggcagcgcggccagggtttccagcagttgatcgcgctcggcggccagacgatccgagtcctcaagcatcagcagattggtgagccacaaggtcaggcaatccaccagcagacagcgctcggttgctgcgttttcacgcagtacacgcgccagttcgacgggttcttcgatcagcccccaatggttggggcgacgctggcgatgcagggcgacgcgctcgttcatctcgccatccaaaggttggctggtggcgatgtacgtgacgggcaaaccgctgtcagttgctagcttttcggcgaggcggcttttgccggaacgggcgccaccgaggatcagttggagcatgacataacacctcgtttggccagtgggaccctcgaagctggcacggttccctgtgggagggagcttgctcccgatggcgtggcgccagtcagcccattggctactgacacaccgccatcgggggcaagccccctcccacctttgggttgcagtgcagcagttgaatactcagcgcattcgctcactgtcaaatcccacatagtttgcgtaacaactcagtatccaagtggttctccaccaagtccgccaggcgctcgatatcgcgctcgcgcagggcgtggtaatccacttcctgcacgtcctgcaaaccggcccagcgcaacagggcgctgcacgcggccgggctttcaaacaagccatgcaagtaggtgccaagaatttgcccatcggcactttgtgcgccatcgctgcggccatcatccagcagcacggcggcattcgacaaagcatcgccgcaggtcacgcccgcatggatctcataaccgctgacctcggcattctccaacaacaaacgcccgcgcacattgcgcaattgcttctcttcttccagcgtggtgctgaacgccagcagccccaggccatcactggaaccggcaagcccttccaggcccaacgggtcgtgcacttgctcgccgagcatctgcaagccgccacaaatgccgagcaccttgccgccatagcgcaagtgacgcgccacggcggtgtcccaaccgttggcacgcagataggccaggtcgctgcgcacacttttcgagccgggcaggatgatcaggtcggcggccgggatcgactggcccggaccaatgaattgcaaatccacctgggggtgcaggcgcagcgggtcgaaatccgtgtggttgctgatgcgcggcaacaccggcaccaccaccttgagcacctgggccgccttgtcgatctggcgttggtcgataccgtcctccgcttcgaggtgcaggtccatcacgtagggcaacacgcccaccaccggtttgccggtgcgcgcttccagccagtccaggcccggctgcaacagcgcgatgtcaccgcgaaaacggttgatgataaagcccttgacccgcgcctgttccgtgggtgacagcagctccagggtgccaaccagatgggcgaataccccaccgcgattgatatcggcgatcagcaacaccgggcaatccaccgcctcggcgaagcccatattggcgatgtcattggcacgcaggttgatttccgccggggagccagcgccttccaccatgaccacgggatagccctggctcaaccgcgcatgggaggccagcaccgcctgcatcgcgatggctttgtagtcgtgataggccacggcgttcatggtggtcacggcacggccgtggatgatcacttgggagccggtgtcgctgttgggcttgagcagcaccgggttcatgtcggtatggggtgccaggttggcggcctgggcctgtactgcctgggcgcggccgatctcgccaccttcggcggtcacggcgctgttgagcgccatgttctgcggtttgaacggcaccacggccacgccctggcgtaccagccagcggcacaatgcggtcaccagcgtgctcttgccggcatcggaggtggtgccctgcaccatcagcgtactcatgttgcgtccttataggcggccagggcttcgtcgaggcgctgccagtcggcctcggtgtcgggcaggccgaaacgcaggctgctgtcgtggacgaacaggcgcagcagaatgccgcgctgggccatgaattcgtgcaaacgctcagcgtggggcgtgatcagccattggaacagcgcgcagccaccgtggggtggaaaaccgtggcgctccagcaacgcgaacaaacgctggcccgcctcgacacaacgcgtgcgttgcagcgcatgcccggccgtgtcgcgcaggcacacttggcccagcacccgcgtcggtccgctgaccgcccaggggccgacctgctcggcgagcaacttgagcaacttgcgctcggccaacgcaaaacccaatcgcacgccggccaggccgaagaatttgccgaacgagcgcagcacgatcaaaccgacctgatgcgcctggctggccaggctcagttgcggggtcacgtccatgaaggcttcgtccaccaccaaccagccgccgcgctgggccagccgcgagtgccaatccagcaagcgttgcgggctcaggctcaggccggtcggattattggggttgaccaccactagtacgtcgaggccatccaggaagaagtcgacttcctgctcctgcacttcgcgcaccacgtaaccggcacggcgccaggcttcggcgtgttcggcatagcacggcgacagcacgccgaccttgcccgcgcgacgcagccgcggcagcaactggatcgccgcctgggaacccggcaccggcaacagatgcgcagcgccatagtattcgctggcggcctgctccaggccgtcgtcggtttccggcaggcgcgcccaggcgcgcaacgggatctcggggatcggccaaggccagggcgcgaggccgctggacaggtcgagccagtcggcttcggctatcccgtattgaatcgcggccttgcgcaaccggccaccgtgctcaagcatagaattgcgcccccgcgcataggatcagcagccacaaccatacgccgcgctgcaccagttgccagccccggtcgatggaatcggcatccgccgccgggccttcgcccagttgcggacgatggtgcacttcaccgtgatagatcgcggcaccgcccaactccacgcccagggcgccggcacccgcggccatgaccggaccggcgttggggctgtcccaggccgggccttggatccgccagcatttaagcgccaggcgcgtcttgcccagcagcgcgtaggtcaacgccaccaggcgtgcgggaatgtagttcagcacgtcgtcgatttttgccgccgcccaaccgaagcgctcaaagcgctcgttgcgataaccccacatggcgtcgagggtgttgctcaggcggtaaagcaccacgcccggcacaccggccaccacaaaccagaaaatcgcagcgaacacagcatcgctgccgttctccagcaccgattcggtagcggcacgggcaacttcggtgcggtccagctcgctggtctggcggctgaccaggtagctcacgcggttgcgcgcctcctccaggtcatcactgcgcagcgcctgggccaccggaatcacatgctcgccgaggctgcgcatgccgagggcgcagtacaacgccaggatctccagcacccagccgatgtacggcgcccacgacaaggccgtggccagcagcgtcagcggcaccacggcgataaaccacgcggtcacgccatggctgcgccagccacggccaccggtattgaaacgctgctcgatgcgcccggcgaaattgccgaacgccaccagcggatgccagcgcctgggttcgcccagcagcgcatccagcgcgactgcagcgacacacagcaaggccacactcattgactcactccccacgcattctcatacaacatgtcactcaacggccgtggttcggtccagccttcgagctgcaacatcggtgccgggtagaactcggccactggtcccaggcacagcacggccaggggtttcgcgccgggcggcaaacccagcagatcggccagcgcctgcggttcgaacaacgagacccagcccatgcccaggccttcgacccgcgccgccagccacaaattctggatagcacaggacaatgacgccatgtccatttccggcagggtgcgacgcccgaagatgtgccgctcgcgatcgtccatcaacgccgccaccagcacttcggcgcagtcgtgaatgccttcgaccttgagcttcatgaactcatcggagcgctcgcccagggcttcggcagtgcgtacgcgttcttcttccaccaattgttgaatctgcccacgcagttggcggtcgctgatgcggacaaagcgccagggctgcatcaggccgacgctgggcgcctggtgtgcggcctggagcaggcggtggagcaattgcggggcgaccgtaccgccgctgaagtggcgcatgtcgcggcgttcggcgatggcacggtagacagcctggcggtcggcctcggggaaggcgttgtcagtcatagtgctgaatcgggcgcaaacaatgcggccaccgcctggggattggatgggaaatagaaatgtacgtaggacgccgtcatccgcccctgccggtataccgcctcggcaccgcgcccgccgttggggctcaggccacgggcgatcggctgccattcagtggtggtcagggaatggtgataggtatggccacgcagggtgccttccggcaattcgacgctttgcagggccagggccgccagtttcttttgcatcaccgcgtcgccctggagcaggccaagcagttcggcgcggacgccgtcgacatcggtcagcgagtccagcaggtagagcatgccgccgcattcggcaagcaagggtttgccggccgcgtggtgagcgcgaatggcgtcgagcatcggggtattttccgacagcgcctggtggtgcaattccgggtagccgccgggcaggtagaggctgtcggcgtcgggcaactggctatcgtgaatcggcgagaagaacgccaactcagcgcccatcgcgcgcagcaggtcgagacttgcaccgtaggtaaaagcgaaggcctcatcgcgggccacggcaatgcgcacgccgttgagcaagggttcggcctcgataacttgcggcgcagcaaatgtcaccggtggcggcaaggcgacttcgcaactgctgcccagggcttgggcggcagcgtccaggcgcacatccaggtcattcagttcgctggcctgcaccaggccgaggtggcgactgggcagttcgataccggtctcgcgtgacaacgcgccataccagcgcaggccctcggtgaggctgccttcgagcagttgcgcatgacgcagggtgccgacccggttggccagtacgccagcgaatggcagatccggctgatagcgcgccaggcccaatgccaacgcaccgaaggtctgcgccatggccgtgccgtcgatcacccccagcaccggcacgccgaagtgccgcgccagatcggcgctggacggtgtgccgtcgaacaggcccatcacgccttcgatcaggatcaggtctgcctcccccgccgcttcccagagcaaacggcgactttcctgcttgcccaccatccacatatccaactgatacaccggcgcaccgctggcgcgctcgtgaatcattgggtcgaggaagtccgggccgcatttgaacacgcgcaccttgcgccccaggttgcgatgcaaacgggcaagcgcggcggtgacggtggttttgccctggccggacgccggagcggcgatcaatacggcagggcaatgacggggctgattcaaagttcgacgcccttctgtgccttgataccggcctggaacgcgtgcttgagcatgcccatctcggtgacggtgtcgcccatttcgatcaactcgggcttggcgccacggccggtgaccaccacgtgttgcatcgggggacgggcttgcaggtcgctgaggacctggtccaggtcaaggtagccgtgcttgagcgcgatgttcagctcgtccagcaccaccaggccgatggaggggtcttgcagcaattcgcgggagaccgcccaggcggcttcggcggcggcgatgtcgcgctggcggtcctgggtttcccaggtgaaaccttcgcccatcacatggaaacgcacttgctcggggaagcggcggaagaacagttcttcaccggtgctgttacgccccttgatgaactgcaccacaccacactgcatgccatggcccatggctcgggccaacatgccgaacgcggagctactcttgcctttgccattgccggtcagcaccagcagcaggccgcattcgttgggggagttggcgatgcgctcgtcgatcacggcttttttgcgcagcatgcgcgccaggtggcgttcgtcgcggtcgggggaatcggtcatggcagctctccgttggggctggacaaaaacggcgggcaggaaaaaaagaacaacagacagccaagcatcgcccaccgtgatgctgttggatgttgcaggccggtctccgggctcatgagtggtgtgcgggttgaaggcaggccaacgctgcgccttcccatatcgcaggcgatacagtggcaaaaagcagcgtcttgactcatttaccgttgcgggggcagcgccggaatcgaggcggcactgtgtagaagtgcgctcactcaccggcttccctgtttcactccgtcgacccgtgggtcacagagcacctggaacaagcggcgaagggtagtaggttgggggtggagcgtcaattaaagcaactgcctcacctgtacttgaagctgccacaaaacaactgtgggagggggcttgcccccgatggcggtggatcagcccattgatcgttagctgacacactgctatcgggggcaagctccctcccacattttgattcgagtctggcgctaaggattgcgtgccaggttgcccggcaacacgcgcttggcgctcaggtaggcattctgccaataggccttggacagtgtatccagcttcaccgtaccgccggtttgtggcgcatgcacaaagcgcccttcacccacgtagatcccggcgtggctgacctgggaaccgccaccggtggcgaagaacagcaggtcaccggtctgcaggttctgctcgctgacgtcctgcgcgcgcattacgatcagctcgcgggtggtacgcggcagggaaatcccggcggcatcgcggaagacaaacccgatcaggccactgcaatcaaacccggagtccggcgtattgccaccccaacgataaggcgtgccgaccaggcccagcgcccggaagagtacgtcttcggccgcaggcgagaaattctgggtggaatagttgaacaccggcttgggcttcaccgctacgggagcgggcggcggtgtgcggcttgcgcaggcgctgaggagcgcggcgcagacaatgagaataaggcgggccgaggtcgacatgtgcagaacaatcctggtctggatgcggctttcgctgccgaacgctgaaaaccagaacgcgcaagcaaagctcgcgcgaacggattacaacaatatccagggattctagcgcttacacgtcaaacttcaagtatcactttaagtttacttgctagcggtaaccgtcgtcggggccatggcgagtgcacgcttggcttcgatgaaggttttgctccagtagctgtcacccaggttatcgacccggacaccaccactgcggcggctgctggagtggataaactggttatcgcccaagtagataccggcgtggctgacacgaccacggcctgccgtactgaagaaaagcagatcaccgggcttgaggttgttgcgtgcgaccaacggtgcattcacgttgatcatttcacgggtggagcgcggcaggttcatgccggcttcttcgcgaaacagatagccgatgaaaccgctgcagtcgaaaccggcttcagaggtaccaccgaaacggtaacgggtaccgatcagggacatgccgcgttcgaggatgctgtcggccaggactggaagctggtaaggcttgttgccggcgaagtcggccagttccttttccgttgcaacttcttcctcataaacagaggcagattgagcagcaacgaattttgcctgattttgaacctgtggtttttgctgatctgccacctgctgagggtgggaggcgcaaccaaacaacagggtaacgagtgcgaggggcacgaggggtgcgaagcgatttagcatgggcacgaccgtggctgatatgtaaagaagtcgagactatgccttctatcacatcgatttgcaaattcaatcgtggtctatgtgacttcttgtttggactatgacatctaagcccttaacaccctgtacctgccttttgcgtggccaaaccggctcaaacgcaggttttctggcgcctgtaatttgccgaaagccgcgaaaacagcgggctagctaccagccgagggtttctttgaggaaggggatggtcagcttgcgctgggcctgcaaggaggcctgatcgagctgttcgagcagatcgaacaatgcgctcatgctgcgggtgcctcgagtaaggataaagtgcccgacctcgtcggtgaggtgcaggccgcgacgggatgcgcgcagttgcagggcacgcaatttgtcttcgtcggacagcgggcgcatctggaagatcagcgccagggtcatgcgcgacttgaggtcggccagcttgatcggcaactcgcggggcgaagtcgacgcggcaatcaacaggcgccgaccgctgtcacgcaagcggttgaacaggtgaaacagcgcttcttcccattccgctttgccggcgatcgcttgcagatcgtccaggcacaccagttcgtattgctcaagatggtcgaagatgccgataccgcggtccatcaactcggccaacggcaggtacaccgccggttcgcccatctgctcgaaccgcaggcacgcggcctgcaacaggtgggtacgccctacgccgtgcttgccccacaggtagatcaggctttcggtccacccggcgtcggcttcgcagagccgctcgacatagccgagtgcagcggcattggcgcctgggtagtagttgatgaaggtggcgtcgtcacgcagacgcacacccaagggcagctgaatcggtttcatgctgactgaacggctccaaacgaaccgttagtggcctctgtgtaaagtttgcaaagtttatacccgtgacgccgggcgcacaatgcaacagaccccaagcaaaatcaaaggtttgcgttaacttgttggatttgtgcagattgtttgacggaccgctcccagaaaagacaaacccggcgttggccgggtttgtgaagaaagggttacaagtcgggatcttcaacccccgtatacgcatccgaatccttgtacagatcgtgcacatggcgcaccagcaccatgatcaccgccgccaccggcaatgccagcaggataccggtgaagccgaacagctcaccgcccgccaggatcgcaaagatcaccgccaccggatgcaggccaatccgatccccgaccagcaacggcgtcagcaccatgccttcaagggcctggccgaccatgaatacggccacgatccccagcatcgggtacaggtcgccgccaaactggaacaagcccgcgaccagcgccgcgccgatcccaatcacaaagcccatataaggtacgatcgcggccaggccggcgatcaggccgatcaacaggcccagttccaggccgatagccatcaagccggccgcgtagatgatccccagggccagcatcaccagcaactgcccgcgcacgaaggcgccgagcacctcatggcattcctcagccagtgaaacaatgcgttcctcacggttgcgcggcagcaggctgcggatcttggccatcatgatgtcccagtcgcgcagcaagtagaacgccaccaccgggatcagcacgaggttggtcagccagccgatcagcgccaggctggacgcagtcgcctggctgaggatgaccccgacgatgtcggtggtctggcccatatgttcgctgatggccgccttgaccttgtcgaacttccagaagccatccgccagccccagcttggcctgggcccatggcatcgccgtgtgctgcagccaatcgagcatctgcggcgccagctcatacaagcggaacaactgcttggccagcatcggcaccaacaccagcaccaacgccgtgatgatcaaggtaaacagggcgaacaccgccaccacgccccaggtccgcgacaacccggccttctccagacgatccaccaccggatcgaacaggtaagccagcagcaacgcgaccaggaacggcgtcaggatcgaatgcagcaggaacacaaaaacgcacagcaggacaaacccgccaagccacacccaacgacgcgtatccgccataaaccactccatctatataaagaagaaaactactaccaacgaaaacgcagttgcgcctgaggttctggggcagcagcaggctgcgcaccctccgccacgggttgctggaccggtgcttcacccgcaggaatttcctgcaacctggccaggctcaactgagtacgcaactgatcggcactgccattgacgcggtacacgatgcgattgccatccactaactgcggctgaccgccgaaaggctccagcagatgacccagcgcggcataacgctcaagggtcatgccctgcacttccagcaattgttcggtgctcacgccgggcttgaccgcaaagcgcggcgccagcttctggctgaccgccagcatcaccgcatcggccacggcgccggtgtcgggcccttgcgccgtgccttgctcacttttgtcgcccagccacagacgccatttggcctgccactggctgccttcctgacgcgcatgcaccgccagcaaggcgtcggcgccgtaacgctcggaggcagcgcgcagcggtgtggcgtcggcactttccagattcggtgcggtggcgaccacctgttcatccaggtcacccagcggcaggcgcaacggcaggcctctgtgttgcgcggcacggcgcagcgcctgggcaacggtctggccatcgcccaccaggctgctgccttcggtggagtcgttcagccaccagccaaggatcgacggccgattgctgccccagatcgacaggcccgcttcccgcagcacgcgatcggtgctcaccgggtcgaaatccacttgcaggctttccggcgggccagcgtcgtagccgtactggctgatgatttgttgcgggtccttgcgaacggccgccaggcccgggccatcggcggccttggcgtcgccggtcaagcggatcaccagggtctgcacggcgcgctgggtcgcctggtcgcgctcttgcggcgactgactgctgacgggctcgagtacttgataaaggccattgagggtttcggcatgactcgccaggctgaccaacgacaaacagcctacaaagaagaacttgaacaaacgcatgaaagattcccgaacgacaaatttagcggctggaacagaccgcgtgaactcggcttggcaaggctgtgaccacagcgaccggtaaaacattcacagggtcctggcagtttttgtactgtcataacgatagcggtttaaaggctataccttaatacgcgccatggcaggggccatcagcattttttaaccggctttttttacctatatggccctgcccgtcggcccgaggatggccgctgcccctcaagcctgataaaatcgcgcgccttcgcagaccgtcaccggctgggccttttaccaaaagcgcctgcccgctcggtcgttacccctgaatcccccctaaaggcctggatcatgagcaagcaaccctccctgagctacaaggacgccggtgtagacatcgacgccggtgaagcattggtcgaacgcatcaagagcgtcgccaagcgcactgcgcgccccgaagtcatgggcggcctgggcggttttggcgccctctgcgaaatcccggccggctacaagcagcctgtcctggtatccggcaccgacggcgtgggcaccaagctgcgcctggcactgaacctgaacaaacacgacaccatcggcatcgacctggttgccatgtgcgtcaacgacctggtggtgtgcggcgccgagccgttgttcttcctcgactactacgccaccggcaagctgaacgtggacaccgcggcacaagtggtcaccggtatcggtgccggttgcgaactgtcgggttgctccctggtcggcggtgaaaccgctgaaatgccaggcatgtacgaaggcgaagactacgacctggccggcttctgcgtcggcgtcgtggaaaaagccgagatcatcgacggctccaaagttgctgccggtgacgccctgctggccctgccgtcctccggcccgcactccaacggttactcgctgatccgcaagatcatcgaagtgtccggtgccgagatcgagaacacccagctcgacggcaagccgctgactgatttgctgatggccccgacccgcatctacgtcaagccactgctcaagctgatcaaggacaccggcgcagtcaaggccatggcccacatcactggcggcggcctgctggacaatatcccgcgcgttctgccaaaaggcgcccaggccatcgttgacgtcgccagctggcagcgtcctgcggtattcgactggttgcaagagaaaggcaacgtcgacgaaaccgaaatgcaccgcgtgttgaactgcggcgtcggcatggtcatctgcgtggctcaggagcacgttgaaaccgcgctgaacgtactgcgcgaagccggcgagcagccttgggtcatcggccagatcgccaccgctgccgaaggcgcggctcaggttgagctgaagaacctcaaggctcattaatgtctcagacctgtgatgtcgtggtgctgctctccggcaccggcagtaacttgcaggccctgatcgacagcacgcgcaccggcgacaacccggtgcgcattgctgcggtgatctccaaccgcagcgacgcctacggcctgcaacgcgccagggacgcgggtatcgacacccgctccctggatcacaaggcgttcgagggccgtgaggccttcgaccgcgccttgatcgaactgatcgacgccttcaaccccaagctcgtggtactcgccggcttcatgcgcatcctcagcgctgacttcgtgcggcattacgccgggcgcctgttgaatatccacccttccctgctgcccaagtacaaaggcatgcacacgcaccagcgtgcgctcgaggccggcgaccgcgagcatggctgcagcgtgcactttgtcaccgaggaactcgatggcgggcctctggtcgtacaggcagtggttccggtagagtctgacgactcggcgcagacgcttgcgcaacgggttcacacccaggaacacaggatttacccgctggccgttcgctggtttgccgaggggcggttgattcttggtgaccagggtgcattattggacggtcagttactcgcggccagcggccacttgattcgaacctaggagattttatgcgtcgcgccttgctcttcgcttttgcgctgttcgccttgccagccgtgcaagcagcagaccttcaccccttctccgtcagctacaccgccgactggaaacagttgcccatgagtggttcggccgaacgcagcctggccaagaacggcgacggctcctggaccttgaatttcaaggcttccatgatgatcgccagcctcaccgaaaccagcgtgatcctgtttgacaaggacaccctgcaaccgaagagctacaccttcgaacgcggtggcctgggcaaggcgaagaagatcaatctggacttcgaccagaccgccaagaaagtcaccgggtttgaaaacaaagacccggtcaacgtgcccctgcaaagcggcatgctcgacaagtcgacctaccagttggccctgcagcgcgacgtggctgccggcaagaagagcatgagctacaacgtggtcgaaggcaccgacgtcgacacctacgacttccgcgtgatcggcccggaaaaggtccagaccaaggtcggctccatcgacgcgatcaaggtcgagcgcgtgcgtgacccgacgcagagcaagcgcatcacccagatgtggtttgccaaggaccagggcggcattctggttgccctgcgccaggtagaaaccgacggcaaggaatacaacatcatgctgcaggacggcaccgttgacggtaaggctgtcaaaggtagctgatcggtagctggaacagagagcctcgcgaatgcggggctttttttcgcctgtcgattgggtttcgcctgacacgaacatgaaacttttgtcataaaactcagggccctgcggcgcaatgtcgcggttttcgcgggctgcagcactgttgcatttaccgcaatgaattgttgcgcgaaaagtcggtttacttagcaagctaacaaatcatataacaaaggcctgcgacgacttgccgcagatccaccagagattggagcaagcagatgactgtaaaagtaactgaacgcgacgacgaacatatgtcccacgaagcactgggccatgggattcacatctgggatgtacaccagcaagacctgttggtcggcatgtttcacaacgagagcgacgctcataattataaaaacgagctcgaagcccttgagatgagacgccagtcagaaagctcctgaagataccttgtagtgagcgggcttgccccgcactgggtggcgaagccgccccactaaaaacgccgcattctttctgggagaatgcggcgtttggttttcagggtcggccctttcaaggtctttaggtagaacaggcgatgagtaccctgtggcaagcccgctcgccacaacaagcctgctcactacaattaaggctgcagccttaccacatcaggtcatccgggatctggtaggcggcgtacggatcatcctcatccggcacctggctttccgtcaggatattgagctggacgatacgctccggtgcgcgctcctggattttcagcgccgcttcacgcgggatcacctcataaccgccgccgtggtgcacgatcgccagggagccgttgctcagcttgttgcgcatcagcgtgttgaccgacaggcgcttgaccttcttgtcgtccacgaagttgtaatagtcctcggtggtcagcttgggcaggcgcgaggtctcgatcagttgcttgacctgggccgtgcgggccttggcctcggctttttcctgctgctggcggttcagttcctggtcgcgcttgaccttctcggcctgcgcttcagccgccaggcgggcctgggtgtcgtctgcctcgatctggcctttatgaaccaggcgctgctgtttctgtttctctttgccgacctgcttggcctgcttttggttgaccagacctgctttgagcaactggtcgcgaagggaaaggctcatggtgcttactcacttaggcaactgctcaaccgcagctggacacattcttttcctgacgtttggcttcgccccacagggcgtccatcgtttcgagggtgcaatcttctatggattggtgcgtatcgcgcaatgcctgttcgataaatcggaagcgtcgctcgaacttggcattggcgccacgcagcgcggtttccgggtcgaccttgaggtgacgggccaggttgaccgccgcgaacagcagatcaccgacctcatcggcaatcgccgcagaatcgttgtcggccatggcttcgagcacttcatcgagctcttcgcgcacgttatccaccaccggcagggccgacggccaatcgaagccaacctggctggcgcgcttctgcaatttggcggcgcgggacagggacggcagcgccgtgggcacgtcatccagcagggagagttgctccggcgcgtcggacttttccgcacgctcctcagccttgatctgctcccagcgctctttgacctgttcttcactcagctgtgggatatccagcggcgcatacaggtcgccggtgggaaacacgtggggatgacgacggatcagcttgcgcgtgatgctgtcgatcaccccggcgaattcgaagcgcccttcttctcgcgccaactggctgtaatacaccacctggaacaacaggtcgcccagctcaccctgcaggtgatcgaagtcgccgcgctcgatggcatcggcgacttcgtaggcctcttccaacgtgtgcgggacgatggtggcgtaggtttgcttgatgtcccacgggcacccgtattgcgggtgccgcaggcggttcatcaggtgcagcaggtcttcgagcgaatacatcatggggtacggttacgccgcgtctcgatgatattcggcaactgggaaatccgccccagcaaccgccccagtgcgtccaaccccggaatctcgatggtcagggacatcagcgcggtgttgtcctctttgttcgagcgggtattgaccgccagcacgttgatccgctcattgagcagcacctgcgacacgtcacgcagcaacccggaacggtcgtaggcacggatgacgatgtccaccgggtaagtgagcaccggcaccggcccccaactgacctggatgatccgctccggctcacgcccgcccagttgcagcaccgaggcgcaatcctggcggtgaatgctcacgccgcggccctgggtgatatagccgacgatggcgtcccccggcagcggctggcagcagccggcaatttgggtcatcaggttgcccacgccctggatctggatatcgccacgcttgccgggcttgtagccggtggccttgcgcgggatcagttccagctgttcgctgccgcgttccggctcgaccagttgctgggccaggttgaccagttgggccaggcgcaaatcgccggcaccgagggcggcgaacatgtcttcggcaatcttcatgttggccttttcggccagcttgtcgaagtccacctggggtaggcccaggcgcgccaattcgcgctcgagcaaggttttaccggcagcgacgttctggtcgcgcgcctgcaatttgaaccagtggacgatcttcgcccgcgcccgcgacgtggtgatgtagcccaggttcgggttcagccagtcgcggctcggcgtgccgtgcttgctggtgatgatctcgacctgctcaccggtctgcaggctgtagttgagcggcacgatgcggccgttgatcttggcgccccggcagttgtggccgatctcggtgtgcacgcggtaggcgaagtccagcggcgtggcgcccttgggcaagtcgatggcatggccgtccggggtgaagatatagacccggtccggctcgatatccacgcgcagctgttcggccaggccgccgatgtcgccgagttcttcgtgccattccagtacttggcgcagccaggagattttctcttcgtactggttggaccccgcctttacgtcggtgcccttgtagcgccagtgcgcacatacacccagctcggcctcttcgtgcatggcgtgggtgcggatctgcacttccagcaccttgccctcggggccgatcaccgccgtgtgcaacgagcgatagccgttttccttggggttggcgatgtagtcgtcgaactccttggggatgtgccgccacagggtgtggacgatgcccagcgcggtgtagcagtcgcgcatttccggcaccagcacgcgcaccgcacgcacgtcgtagatctggctgaaggccaggcccttgcgctgcattttgcgccagatggaatagatgtgtttggcgcggccgctgatgtcggcttcgacgccggtggcctgcaattcggagcgcagctggttcatcacgtcggcgataaagcgctcgcggtcgagccgccgctcatgcagcaacgtggcgatctgtttgtattgatcgggttcgaggtagcggaaggacaagtcttccagctcccacttgatatggccgatgcccaggcggtgcgccagcggcgcatagatgtcgaagacctcgcgggcgacgcggttgcgcttctcgtcgtcggcggtcttcaccgcacggatcgcgcaagtacgctcggccagcttgatcagggcgacgcgcacgtcatcgaccatcgccaccagcatcttgcgcaggttctcgacctggccctgggtgcccagcaccatggactggcgcgggctgaggctggcactgatcgcggccatgcgcagcacgccgtcgatcagcttggccaccacggtgccgaaacgctggctgacggtgggcaacgggatatgcccttcacgcacgccgcgatagagcacggcggcgatcagcgaatcctggtccagcttgagatcggcgaggatctcggcgatttccaacccggtgcgaaagctggaagtgccttcggcccacaggttcttggccgcattgtcttgctgctcggactcacgagcgaactcgcaggcggctttcaaggcttcacggtccagtgccgggtcgacactgatggcatggtccagccatgcctcgagattgatactgccgtcggtgttgatcggctggtgtgctctcacctgtaccatcttgcttaccttccctacgacgcaccttcgatgcgccaaaatcatcgccgacgtttactgcgaactccctggcagatcacaggccctggagaacgcaggccagtcggattaaacgggcatcctagcccgcttcaaataacgccatggcctcgacatgcgcggtttgcggaaacatgtcgaggatcccggcacgttttagccggtagccttgcttgaccaactcaaccgtgtcccgcgccagcgtggccgggttgcaggacacatacaccagacgcttggcgcccaaggtcgcaagcttgcgcacaacctctagggcaccgtcacggggtgggtccaagagtaccgcagaaaagccctgtttggcccattctgcgtcaatcaaaggctgggacaaatcggcctgaaaaaactgcgcattatgcaaatcgttgctgacggcattcacggccgcccggtccaccatggtctgcacaccttccaccgccaccacttcacgcacctggcgcgccagtggcagggcgaaattgcccaggccgcaaaacaggtccagcacccgttcgtcgggttgtggcgccagccattcgagggcctgggcgaccatcgccgcgttgacgccggcgttgacctgcacgaagtctcctggccggtaagccagctccagattccactgttccagttgaaagcccaacacagcatcggtgtcgaccggctccggctggccctcgccatgcagccacaattgagcctcatggaaagtgcagaattctctcaacacctgcaggtccgcttcggacaacggcgccatatgccgcagcaacaccgcaacggatgtaccgctgaacaattccacatgccccagggcctggggtttgctcaggcggcgcagcatgttcggcaggcgctgcatgatcggttgcaaggcctgtaccagcaccgggcaatcatcgatggcgacgatgtcctggctggccacggcgcgaaaaccgacgtccaggtgtttcgccttggcatcccaacgcaccgccacgcgggcgcggcgacggtagccgaattccggcccgctcaacggcgcggcccactcttgcggttcgacaccggccacgcgggacagttgctcggcgagcatgcgctgtttcagggcaagctgttcggtgtggggcaggtgctgcacgctgcaaccgccacaacgaccaacgtgcgcgcacggtgccgggcgacgcagttcgctggccttgaagacgcgctcggtgcgtgcctcgacgattttgccgtgggcacccagcactcgcgcctcgacttcttcgccagccagcgcgccgttcacaaaccaggtgcggccctcgaagaacacgatgccacggccatcattggccaggcgctcgatggtcaggcgttgtttcttgcccaccggaatctgcggggcccggctgccgcccgtcggttggaagcgcaggcctctctcgtgcttggccatcagttgggttcgtcgaagatgccggtcgacaggtagcggtcgcctcggtcacagatgatcgcgacgatcaccgcgttttccacttctttggacaggcgcaacatgcccgccaccgcgccaccggaagacacgccgcagaagatgccttcttcacgcgccaggcggcgggtggtgtcttcggcctcgcgctgggccatgtcgatgatgcggtccacacgcgtggcgttgtagatcttcggcagatactcctcgggccaacggcggatccccgggatggccgaaccttccatcggttgcaggccgacgatctggatcgccgggttctgctccttgaggtagcgcgagttgcccatgatggtgccggtggtgcccatggagctgacgaagtgggtgatggtgccctgggtctggcgccagatttccgggccggtgctggtgtagtgcgcctcggggttgtcgccattggcgaactggtccagcaccaggccacggccttcggcggccatgcgctcggcgaggtcgcgcgcgccttccatgccttcttcctgggtgaccagcaccaactgggcgccataggccgtcatcgccgccttgcgctcggcgctgccgttgtcgggcatgatcaggatcatcttgtagcccttgatcgcggcggccatggccagggcgatcccggtgttacccgaggtggcctcgatcagcgtgtcgccgggcttgatctgcccgcgcaactcggcgcgggtgatcatcgacagcgccgggcggtccttcacggaaccggccgggttattcccttcgagcttgagcagcagggtattactggtttcacccgccatgcgttgcaagcggaccaggggcgtgttgccgacgcaatcggcgattgtagggtactgcaaggtcatggcgtattcgcaatccagactgcggggcgcacatcataccgggaaaggctggcgggccatatcacgcaaagtgtggtgcttattgctttagggtataagcacgagaaatcatccgatcacgaacgctgtccattcctggtgggtaaggtcccgaatccgcttgttttcggctgatgcccttgcgtcccgcacgccattgagacgattcacgtactgcccttcactgatcaagccactcgccagttgttgatcagcaacctccaatagcttctggaaacggcggagcctgaattcgagatctgcggcatatttatgttgaataaaatgcacccagaaaggctccttctgtaacaactcaggccagttcgttcccgtctcattattcagtacagccgtgcgcacggtattgaccgaatggacatccggcacagccgcctcaaaacgctgagggagtacttgcggcaaattcaggctcgatgccagggcgatgcgataactcaggacccgtgtgcacgcgaatgccatgccctggggctcaaagtgcctggaaagatactgatctatgtattcaagacgacgtcgtgcacggtagtaatgcaacagatttggcccggcagtttgtacgccggcatcgagtatccgtagcggagctatttgcaactcaagttgatgtaagcacaacaggcaaccatcaatccctccgcgaagggtgcgataacacggtaagtaagcaattcgctccacgccctcatgggacatcgcatcgtcaatcactccccagactcggtgtgaaatgatctccctcatcacacggtggtgggggtcaatgaactgcgggtaatcggcaatgcttgccagcaactcaaagaaataatccgccattggctggttttgcaagtacgcccaatcgagttggcgcgcttgtacttctccaggagggagcagcgccaaccagcggtcgggacgctgatcaaaaggaaccgtcggttcccataatccgaaatcaacatcgggggggccacgacgctcgcccactcggcgtaacaactgtcgcgcctgcgcggaaagcggattacctctcaagttcattccctgatggacttcgggataaatgaacaagtccgtctcggccaggtcctgtatttgattgtcacgcaggtcaaagctgcccaacgtggagagactcaccgcaccgcgcggtaattggctcaacgcgcaattgcgcaggttcagctcccgcaggttcgtcaacctatacacgttcaagcgtcgtccttgcccaagtgggtttcccgacaaatcaaggcttctgagttccgtcagctcagccagtcgttcctcgtccacatagttgaaccgcaggtggttgttcgacagattgagcactgccaggcgcgcgtggaggtccagattgggcagatgagtgagtcgattaccattgagatagagaagacgcagcgccggaaagctgaaaagaaagcgctccggcaacgtcgtcagtcggttgtttctcacgctcagcatagtcacatgagcaaagtgcgcgcgcagggtcggcaagcttgccaaatccagatcgtccaggttgagttcctcggccactccctgagtgaaaccttccttggcccagcaacgctgaatccgctcaaccgccaaggctcgtgaacgggccgatgcgcggtccggctggactgtcgacgcctgatcccgccatgtttgcaagtccctgtacagccgatcacgctccttgacctgatagttgatcaagtcttctcgctctttgaccgtgtcgtgcgcctccgcaagcatcgcccacacctcggcatccgttttaaaggggtacaactcgcgcatgcgcttgatctggttacgctctgtcggcccgaattcggttccaccactgagtgggtagcctttgcgaccattgatcaggcgtggtggtgcgagcctcgatggcattggccgcatgttgagtgtcgattggattcccgaccaatcctgtcccaggcgggctcccatttccgcgcgcaattcctccagcgcgccggcatgggtgtagcccatcgcctgccgctcggccaggggcaatgcgccgagcaaggcctccaggaacggcgcgcgtgcccccaccgcctgcaagctaccatctgcccgttggacgtaggccaggtactgtccgacgctcggtttcaagacccgtcgaaggtcagcatcatcgggaccgacgctgtcgattacgcggtgggcatcccagagttcaacccgcagcgatgtcggccagcccttgagaccagccagttcatggagcatcaaccgagaactgtcgtcattcgccaacggcgacaggtgcacgccttccagggcaccacagacccgcaaccaacgggaccaccaccgcgcctcatgcgccaaggtgtgcggtacgcgcccctcccggaggcgctccaactcagacgcagaagcatgttgcacccagtcctgcgcaatccccacggtcaatccagggaactgacgcactatcacctgtaccaaagggtcatcggaccgctggttcttgcggcgcagcacatcgaaaaactgcgcgtgcatctgcagtttgtccatgtgcaccttgctctccagggccgcaacctgatcttcacgtgcaagacccgccttaccgaccaacgcatcggcattgtcaggcgttatttcatcgagcacctggacaataaactccgaccccatctccagtccttgcttgacccgctcaaagatattcaagcgttcgaacgtctccaccaaaagcaccggcggcggttcgctgcgcatatgcaccttgcgcagtatgtccggcgtcacgccgctgatctgctggaccttgtcgatggcatcgggggtcaatgtgcgaaacctgggacccaggcggtaaaagggtttatgcccgttccaggtcagcgggttctcccattcatgccgccacgcgcccgcgccgttatggctcagcagcggcgcatacgcgtcgtccagggccggatggcggatgcgccaggggcgggtttgatcctcctgggtcactttgaaatattggctatcgatgaacaaatagcggtccgactccagagagtacaaccccaaggcatcgggctcgggtgcaatgcgccgggtgtcgacgtcactcgcgtactgcgcgatgtcgcgcagcaccgggtagaacgtgccttgcggtgcacgattgcgcagcatcgcctgggccacttgatgacgaaacccagtgatggccgcgggcatatcggcgccgaaccgggcgcgatcgtgatcggagagttggctcagtagcacccggaaaaacgcatgcgcgccaccctgctgcacgccggcgccctggctgcccggatcatagggcgaaaactccccatcaccatggtcgaggatcaacacggcatgcttgtcacgatccaggggagcgtaggttgacgggcggacaatcagttgcttgccgatagtcctcaaggcactgcgggcaaacgcctggacccaggcctgggtttgcggatcaaacctgcggcggtggtagatgcggtcaatgagggcctcggcacgcgccatctgcgcggcaaccttgagcgcatcgtagagcggctcgggttgttgtcggacttcaagcaaacgggtttgctggtcggccgacagcggatgctgatccagcacctccagcaacctcggcaggctgacgccggggtgcaatacgcgcagcgcctcgatcacctcgggcaccgggtagtcatgcccaaggctgtcaggcaaccatttacatacggacaccgaagcgcggatagcgctcgagcgatgggtgtcggcaaaccgggtcaaggcttcgaacagatcgaaccgcgacgcctgggcctgggccgccagttgcaaacggaccgcctgttcgccggcggaaaaactcgagggtaaaagttgtaccaccgcgtcggacaggtgcgcggtgatgcgctgcggtgcagagtagccaaactggtggttctccagggcggtaaccgtgatcacaaccgtcgtcgggcgggtcgcatccctgctgtagcgacgtagctcctggccctgtgtgttgacgattctcaacgccgtgtccagcggccacgccggcagctgggtcagcaacgggcccaggacttcgaatgcccccatgggcactggccggttggaatcgaccgagttggcggcccagtcaatcagccggtcggcgttgaaccgatgcgccgcctccaccaacgaggctgatgggcgtgcgcctgcccagacacgttccaattgttcgcgtgatgtgccgctggtttccagcaaggcctgcagctcatgcgcaggcgcctgggagggcagcaacatgcgctcaagcaactgggggctactcagccccgtactgtccttgatgctggcggcgggcatttgcgaaaggcgttgatacaaggcttgatggcgccgccgtacactgaatgccaggcggctatgcagccgcccgctgatcagcaggtcggccaagtcggaaaaggccagcaccagttcacctgcatgcccctccagcacactggacaagccattgagcaacccttcacccagcgccacgaacaacgcgatcgcccttacacgcgccaaccccttgagcgggccgggaaccggcatcagcaatagctccagcacctcgccaatcacagtgcgcgcaataccggcaagggtcgtcagaacccccggcgtctcgttggccaggctcttcaggttagtgcgaatgcgcgccaggtggaggtcgcccaaactgacggggggggctttggtcacgaccttgcgggtatagccggtccggtcctccaggcgaggctcgaacacctcgagaaacagatcctgtaatgcctcggcaaaaggattaagcccgctttcacggatggcgccttgcctgagcctggtcaagcgtgcgctgtcgggctgtgacatgaccgcgtataaccacgccacccggccctgccggtagaaagcactgaacgccacataaaattcctggcaggcttcccggtggttgtcgaaatgacgcaggtcgcccccgcccggccgacggggaaagtaactgaacgcgcctttgcaaccatcaacggaaaacaccagatgggggatgttcaggctgtctcccggcggcctgctgagtatttgcccggtgttgccgataaattgaggcacccaaccgatgttgtccttgccgtcggggatgaacagctgcatttcctcgcagtgcccccacccctcctgctgctccagcgcttgcttgatagcgcggtatttttcccggtcgactcgggtggtgttcgagtctctcagggcttcaatcagggcgaactcaaactccagccgccccagtctcacaatcgcctggcccaacggcttggccttgtccaggttgtcgtcgagcagggttctgagttggccaccgagattgagctcgcgcaccaacgcgatgaaatcctcggggctgaggtcgatactgagcctgctggacattgccacgccgtcatggccggggtaatcccaacccgtcaggccgtcatagttcatgcaggcggcgtcccacagcgaaagccggacgaccttgggctcattggtacggtctgccaggtcgcgccgatgtcgacgagggccgaacgaataggtggtggtgatatgctgggctttggggtcaacctcttgaccggtgaggtctttgaggcccgttcgcaaacgctccaggctttggagttcaaactgtgtgacgaattgacgaacgtttcgttcgacctccgcctgggcctcgatcaacgcccgttgcaggcgtacatattcgcgctggccatcgtcatccagcccggccatgaaagcggcaaatttctcctgcaaggcgtccacggtttgcagggtcgcccactcgtcgcctgcgaccaagggcagcctcgctcgctgctccgccatgaacgccgccaacggatctgcctgctgctgtgtcgctaccggctcaatcatttcacgctccttgaaatgatcagcctatccactacccgtcgatggctccggtagctatgtagcgcattgattcagccatggttcttttcgaataccgctgcgcccatcgccgcgatctgcccctcgatcaacgcgtcgaacggccgcaacaatggctcgaaggaggtgggagcctccaatacctgcagggcctgcgcaatcgcctcgacggtggacaacgcacctggcgagggagccttgcgcagtcgataacgtgacacggcgtcgcccgccaatgtcacccggggcagcactgccagcaacgggttgaggtgcaacaacttgcgcgccttgcgccaggtgccgtcgggcaccaccagcaacagcggggtgtcgtccggcgcatagtgctgcaaaggttgtgcatcgtccgccggaaacaacagccgcgcctgataaccgggtggggtcaacaatgtcgccagatcgtcaaacacctcccccaccaccaactgcgcgttgttcaagcccagcgccgccagcctcgcggtgttcagcgcgtggttgacctcacttgggtgctgcaacagcagcacgcgggtgcggctgtcgaggctggggatcagcgcgcacaggcaatgggtgacgggccgtaggcagcgggaacattggggtctggacatggtgttatcaggcctggttgagctgggctttgagtagatcgcggaaagtctggatcaacggttcacggctgcgaccacggcgcatgatcatcgaaaacggcgcctggtagccgaaggtcgccggcagcaacacgcgcaaatcgcctttgtcggcccaggcctgggcatagtgctcgggcaggtagccgatgtaggcgccggacagcaccaggatcagttgcgcctccatactttccaccgttgccgcgctgtgcttgaagccatggcgcgccagttcggcctggctccagtagccgcgcccgaccatgcgttgctgggtgatgacttgctcgggaatacgccgctcgttgaataaagggtgacgggtgctgcaatacagccagtgctgctcgcggtacagcggcatgtagatcagcccgctcatgcggttggagaaggcgccgatggccaggtccaggcggttgtcctgcacgccgagttgcagctcgtagggactcatcaccgacaaatgcaggtgcaccgccgggtgctccaggctgtaggcgccgatgacttcggcgaatggcaaagccttgtcgctgacagtggagtcgagcacgcccaatttgagggtgccgcgcaactcgcctttcaacgcggcggcgtattgctcgaagccttccagttcaccgagcaggcgcaaggtctcctgatggaacagctcgcctttgctggtcaggctgaacccgccgcggccgcgatggcacagcaccaggcccaacgccgattccagctggctcatataggtgctgatggccgaggtggacaagttgagttcgtgctgggcattggcgaacccctggtgacgcacgacgctgacgaagatgcgcaggagtttcaggtcgggcaaggcgttggccatgggcggctccagaggcacacacaaaatcctgtgggagggagcaagccccctcccacatttaaacgcagtttaccccaggcattagtttagaaaaatctgaactaagtatttgcccctgccgattctttcgtttcccggtatttcgcagaatcaggccctaataaacaaaacaacgatgaggcactcccgtggacaagattttccaccaaccactgggcggcaacgaaatgccgcgctttgccggcatcgccaccatgatgcgacttccccacctgcaaaccgccaagggcctggacgctgccttcatcggcgtgcccctggacatcggcacctcgctgcgcgccggcacccgcttcgggccgcgtgaaatccgcgccgaatccgtgatgatccgcccctacaacatggccaccggcgctgcaccgttcgactcgctgtcggtggcggacatcggcgacgtggcgatcaacaccttcaacctgctcgacgccgtgcgcatcatcgaagaagcctacgacgagatcctcgaacacgacgtgatcccgatgaccctgggtggcgaccacaccatcaccctgccgatcctgcgcgcgatccacaagaaacacggcaaggtcgggctggtgcacatcgatgcccacgccgatgtgaacgaccatatgttcggcgagaaaatcgcccacggcaccaccttccgccgcgccgtggaagaaggcctgctggactgcgaccgcgtggtgcagatcggcctgcgcgcccagggctacaccgccgaagacttcaactggagccgcaagcaaggcttccgcgtggtccaggccgaagaatgctggcaccactccctcgcaccgctgatggccgaagtgcgtgaaaaggtcggcggcggcccggtgtacctgagcttcgacatcgacggcatcgacccagcctgggcaccgggcaccggcaccccggaaatcggcgggctgaccaccatccaggcaatcgagatcatccgtggctgccagggcctcgacctgattggttgtgatctggtagaagtttcgccgccctatgacaccaccggcaacacctcgttgctgggcgccaacctgctgtacgaaatgctctgcgtattgccgggcgtggcgcaccgctgatgagcacgcacgaggtgctgcaagccgctgccgagctggtggcggccttcgcccgcaatgaccgcgccgcctacttcggcgcgttcacggccgatgccagctttgtgttctacaccctcccccagccgctgctcagccgcgatgcctaccaggcgttgtgggacagctggcgtcgggacgaggggttcgaggtgctgtcgtgcacctcgagcaacgccgtggtcagcctgcagggcgacgtggcgatatttatccatgacgtggccaccgagctgcgcatgaacggggagcaattcaaaagccaggaacgcgagaccattgtcttcacacggcaaggatctggcgcacaacaaaaacaaggccggtggctggcctgtcacgaacatttgtccgctatgccggaagggctgccgcccccttagccaatgtgatcggagctgatcatgaataataaaaacaacgataaaagtattcgaaaaatagaaaccaacggggtcgagcagatcccggaccacgaacgtaccgccggccccaaggatctgttccgactgatcttcggcggtgccaatacctttgccaccgccgtgctgggctccttccccgtgctgtttggcctgtcattccaggccggcgtctgggcgattgtgctgggcgtgctggtgggtgcgctgatcctggcgcccatgggcctgttcgggccgatcaatggcaccaacaacgctgtgtcttccggtgcgcactttggtgtgcacgggcggatcgtcggctcgtttctgtcgctgctgacggcgattgccttcttctcactgtcggtgtggagttcgggtgatgcgctggtgggcggtgcgaaacgtctgatcggcctgccggaaaccgacctgaccctggggctggcctacggggtgttcgccattctggtgctgacggtgtgcatctacggctttcgcttcatgctgtgggtcaaccgcattgcggtgtgggcggcgagcctgttgttcctgctgggtatcttcgccttcgcgccggctttcgacagccacttcgcaggcaccgtcgcgctggggcagaccggcttctgggccgccttcatcggcgctgcactggtggccatgagcaacccgatttccttcggggcgttcctcggcgactggtcgcgctacatcccgcgtgaaacaccgaaaatgcgcatcatgctggcggtggtcctggcacaaatcgcgacgttgatcccgttcctgttcggcctggccacggcgactatcgtggcgatcaaggcaccggactacatcgcggcgaataactacgtcggcggcttgctggcggtggcaccgacctggttcttcctgccggtgtgcctgatcgcggtgatcggcggcatgtccaccggcaccacctcgctgtatggcaccgggttggatatgtccagtgtgttcccgcgcctgctgtcacgggtcaaggccaccttgctgattggggtgatgtcgattgccttcatctttatcggacgtttcgccgccaacctggtgcagagcgtgtcgaccttcgccgtgctgatcatcacctgcaccacgccgtggatggtgatgatgatcatcggcctgatcgtgcgtcgcggcttttactgcccggatgacctgcaggtattcacccgtggagaaaccggcgggcgctactggttcagccatggttggaactggcgcgggctgggggcgtggatcccgagtgcgctggtgggcctgtgcttcgtcaacctgccggggcagtttgtcgggccactgggcaacctggccgacggcatcgatatcagcctgccggtgacgctggggctggcgtcggtggtgtacctgaccttgctacgcatgttcccggaaccggcggccgtctacgggcccgccgaccctcgcagcaagcgcacggatgcgcgcgttaaaccggcgctgcaaccagccgcctgatcgcccataaaaacgataatcggagactcgccgtcatggctttggatttattcgtcgtactcatctacgccgccggcatgctcgtgctcggctactacggcatgcgccgcgccaagacccacgaagactacctggtggccgggcgcaacctgggcccgtcgctgtacatgggcaccatggccgccacggtattgggcggtgcgtccaccgtcggcaccgtgcgtctgggctacgtacatggcatctccggcttctggctgtgtgccgcgctgggcatgggcatcattgcgctgaacctgttcctggccaagccactgttgaaactgaagatcttcaccgtgacccaggtcctggaaaaacgctacaaccccatggcccgccaggccagtgcggtaattatgctggcctacgcgctgatgatcggcgtgacctcgatcctggccatcggcaccgtgttgcaagtgttgttcggcctgccattctggatttcggtgctgctcggcggtggcgtggtggtggtgtactcgaccatcggcggcatgtggtcgctgaccctgaccgacatcgtgcagttcgtgatcaagactgtcggcctgatgtttatcctgctgccgatctgcctgtaccgcgtcggcggctgggatgagttggtcgccaagctgccggcgtcgagcttcagcttcaccgccatcggctgggacacgatcatcacctacttcatgatctacttcttcggcatcctgatcggccaggacatctggcagcgggtgttcaccgcccgtgacgaaaaggtcgcccagtacgcgggcaccttcgccggtttctactgcatcctctacggcctggcctgtgcgctgatcggcatggccgcgcacgtgctgatcccggacctggacaacgtcaacaatgcgtttgccgctatcgtcaaagcctcgctgccagacggcatccgtggcctggtgattgccgccgcactggccgcgatgatgtccactgccagcgccggcctgctcgctgcctccaccgtactgaccgaagacctgctgccgcgcctgcgtggcggcaaacagtcgagcctagccgtcaatcgcctgttcacaatgctgaccggcatcgccgtgctgggcatcgccctggtggtgagcgatgtgatcagcgccctgacgctggcctacaacctgctggtgggcggcatgttgattccgctgatcggtgcgatcttctggaagcgcgctaccacctctggcgcgatcacctccatgaccttgggctttgtcaccgcgctggtgttcatgatcaaggatgggctggatgcgaacacgccgatctactacagcctggcggtggggctggtgagctttgtggtggtgagtttgttgtcgcgtcggccagaaggtgtagcggccagcgcggtttgagaaaaagcgggttttagaggggtttcttcagcgggcgcgacgtcggatgtcgcgcccgtttttttcactcaaccgccaggttctggtttgcctggatgatctcctggaccagggaggcccataccagtccttgggttgtgccgccggcgtaggcttctccggctgctacttggtgatgggcgcaacagtgaactatcgaagttccgtcctcctcactggctataacgacgaagtgccccctgctctgctcggcgatctgaacccgactcagaaactgtgacggaaaccgaaccccggagcctctcaaaagcgcctcgatctccttcttcaaatggataagttccaggccgtagcccggaacctcaacatccctagcccgcgcgaatggtgcgagcgtcgggttgtcagccagaaacttttcaaacagctcgatacctgcacgattgcactcaacggccaaatacggatcggcataactggcgccatcgctcttctgatctcccccatacacggtgacctgataattcgccaaccggagcattacggcctggaacaggccattgatgcctctgccgataatcgatacacgcggcgcactggaatctaccggcagagaagggagcgtcaatgattgtgcaagtttacgcctgaccagaccgcgcaaggccgtcaaactcagctgtattgaaacggcatagtcaaggtcgcgctggcaggcctcggtggttgatgcctgggtagtgagcgtcgcaggcctgtaccaggtggagacctcgcagccgagcgtctgcgtgcgttgccggaacgcatccaatgtcgcaggcccataatccaataccagctggatatgttcagcctcggccagggcatgcaacgcaccgtcgctgaagacgtccggcttggcgacacagatcaggcgggcttggctgtgcaggcactgaatgcgggcctgatcaaggcgatgaacggactcatcattgagggatacgcacactgccacagcagcggcgccctccaaggcctcgaaccagtccacgacaaatgacactcgactgtcggaagcggcattcccgagagtatccggcgctcgacctggccggaccagcactctgatccgaacatttggatctcgatcaagcaacaggttgaccagttctttccccacattgccgtatcccagtacacgcacgtcacggggaatggaaccatcagccagtctcagccaacgcaggatataggcggccacatgcggcgcattcacccctggggtgttgagtacttgaatggcgtgggattcacacaggtccagtcgtatcttgtccaaactcgtacccctgcggatcaaacagaggtttccaaaggggtgggaggtacgccattgctccaggacatctgcatcgatgggttggtctccaacaatgatggttgttggacgcaggagcgcgatctgtatcagcagcgcctgcctggtcaatgccggcgaaagaaacacgacgtttctgggtgcctcggccttccagcttttcgacacaggcgcagcctgtaaaacacagtcggtggtggtgatgagtgacgcggcgaccggaggaactgaagagagcaacatagctttgtctccaacaactctgactgacacctcgaaaagaggcactcaataacgttggggcgctatgaagaggcgcttgagtttcaagctatgggtatttctggaattggataagccagccgtttccgagtgacaggtagtccgattccgacaatcgaacgccaagggctgaccggcagacccacagcgcttgctcactcctccccgctgctgagacctttaaacaaatcaacacaatccttacagccgaaatattgctcgactgccgggcattcgatctcccctgtcgcccccgccctcacccgccacacacacgccttgccatgatatttcagtgtgccttcaaggtaacaaggcgcccagtcgtactcgtcatgcagcgtgcctccatcaatgggctcagcacgcttgaaaaaggacgcgacctgtcgctcatccagcgcaacgtcactgggtcgacagcgttccggctcttcggagtaaaagcccaaaagggcaatttcgtcgatatcgggaggggaagtcgtgcatccggcgaggaatacccacacgccaagtgaccatcggcgcagactcattgccacaccgcactgctggcttcgccggggtgtttgtaagagatttgcggatgcctgtagacgtcctccggcgtcaggcggaaatgaccatataactcccccaccagccatcgcagagattgactctgcatcgcggtcacttcctcataacgtgcagcatccagatgcttgccgaccaattcgatgcccagggaatccgcattcatcgggaatcgctcaggatagcccttggtgcgttcataccgatccagcgcgcggatctgcaaggtccaggtgagtgcttgaatagcttggattcgggcggggtcgcacgtcgccttgtccgttgccatgcacctggagcgcaggtagcggccaacgtgataacaacgtttcttgaggctggccgtctggtagatcacaccatttttctcaatgagaaagtgtgctccgttgccttttgcaagataggcgttaaaggtgtgctgggcggtcggggcatctgtctggtgaatcaccagcgcgctcacgctgcgcaaatccccgtgctcgatcgattgaaaccgacggagttcgactctgtcggcaatcaacatcccttcgctatcaatactcgacatgccactgcccattcatccatgtgaaggcaaaaatatagaaggacaaacagggaaaagggcatggatgacgggataagaagaaggctctgacgatgacacgtgcctcgtcagacaattgggcacactacccaatgaacgggaatacagtctgattacagggaaccgaacacgccctgaagaacaacccagccatgagcgcccgcgcgattcaatcgcgtgagcgcttcaggacttacctgcgacgtggacgacgctgctcgtcatctgtgcgaatcggtaccggctgcagcggaggctcgatcaagcccaatgcaacacccaggtcatggagccagttttgaattttctctttcatggttgccccctttgagggtaatgcgggtaggcgcaagttctgtcgccctttcctacagtgatagtagccctaagtcctacgtattgcttgaacgaaaacacaacgaactattactgaattcatcaaaatcctgccggatcgctcaagcaatggcgcgggtgtcttgcacaaccgcagccttgccggcttgctgcaggtcgatccatgcgttgaggttagcgccgagcataccctttcgccacatcagccaggtggtcgcagtggcaaaaggccctatcagcggatgaacggacacgctgtccttgccgggcaggctgtcgagcatggactcggacatcaacgccacacccgatccggcgatcacgcaggcgagcataccttggtaagactcgatctcgatcgcccgccccatggccacgcgctcgtgggaaaaccaggtctccaggcgggtgcgataggcgcagctgcgacggaaggtgaacactgaacgccccgccacatcctgaggtccacgcacgggcggatgatcggcttcgcaaatcagcaccaggcgctcttcgcacaaggcgatgccgtccagggaggcgatggtgatgggaccgtccacaaaggccgcgtccaggcgaccggtgatcaacccttcgagcaactccccgctgggcgccgattgcacctgaaggttcaccatcggataagccttgtgatagcccgccagcaacttcggcaaatgcaccgcggccgtgctgtacatgctgcccaatacaaaatcgccagccggttgcccaccttgcacggcaccgtgggcttcgtcatgcagggcgagcagacgggtgctgtagtccagcagcaccttgccggcaggagaaagctgcaagcgttggcgctcacgcacgaacagctctacgccgagctgctcctccatttgcttgaggcgcgtcgacaggttggacggcacccgatgcaagcggtcagccgcacgggtaatggagccctcttccgccacggcctggaaaatgcgcaattgactgaactccatgactttctccaaaactgaacaagttactcactattattcaattttacagaaagtcaatccgtcttagcctgagggtattcgcttacctgcaggaaacctgaccatgtctcccctgattcgcttaactgccagctttgtcgccttgatgatggcgatgggtattggccgcttcgccctcaccccgcaaatgccgcacctgctcagcgaagggcagatcgacttgactggtgcgggcctgatcgccgccgccaattatctgggctacttcgtgggcgcggtggattcgatcttcgcgcgcagccatcaccacgtgcgtggccgtttgtatggcgggttgtggctgtgcgtgctgctgaccctggcgtcgtactgggcccatggtttctggccgcatctgttgctgcgctttggcaccggtgtcgcgagtgcctgggcattggtgatgatcaccagcctgagccagccgctggcgatcgccgccgggcgtccacgtctgggtgccttggtgttcgccgggccggggctggggattctgttgacggggctgctggcgctgggctccaacctgttggggcaaagctcggcaacgctgtggctggtgtacggcgtcgtggcactgctgatgttgctggcgattctgccgttcctgcccaagccttctgccgccggcgctcccattgccagccatagcgagacgggcagcaacggcagcatcgcgcatttgtgctggatctacgtgttgtacggtctgggctacatcatcccggcgacattcctgtcgcagatggccagcgcacagttcaagggcgcctggcaggctgacctgttctggccgtgcttcggcctggcggccgcgatcggtgtggtggtggcgaccctgcgccgcaaggacccgaacaccacgcgccgctggttgatggccacgctatggctgcaagcggccggggtgtttgcctgcttgctgggcaatggctggggcctggcactgggggtcctgctgtgtggcgggccgttcctggcctgcatgcagttggtgatggcccggctgcgggacgtcgcgccccatggctaccagcgcagcaccgggctgttgaccgccagctttgccatcggccaattgagcgggccgttgctggcgtcggtcagcagccacttgagcggtggcctgcaaccggcgctggtggtcgctggagcaggcttattggtagcgggctcggtgctgatcaaccggcaaccagcggcgcaggcacacgcacctgttcacgccgcgccagtaccaggaaaaacagcccacccagaaagcacccggtaaaccaggcaaaattggccatgccctgcaaggccggggtgaaagtgatcgccacgcccaccagcgtcgcgggcaccaatgccttgaccgccgtccagttcacgccaccgtcgaagtagtagcgcccgctggggctgtcatcgaacagtgcatccacgtcgatctgctgttttttgatcaaatagaaatccaccagcaggatcccgaacagcggcccgataaacgccgcgaggatgtctagggtgtagtggatcatcagcgggttattgaacaggttccacggggtgatgaagatcgacgccacggcagcgatcatcccgccggcgcgccagctgatcttgctcggcgcgacgttggcgaagtcaaacgccggcgagacgaagttggcgacgatattgataccgatagtcgcggtgacgaaggcaaaggccccgagcaatacggccatgctgttgtcgatgcgcgacacggtggcgatcgggtcatgcagcatttcaccaaacaccggtaaggtgcccgagacaatcaccacagtcaccagggaaaacgccaggaaattcaccggcagcccccagaaattgccgcgtcgtacgtcctgcatgctgcggcagtaacggctgaagtcgccgaaattcaaggtcggcccggagaagtacgacaccaccagcgccgtcgccacaatcacctggccaaacgcctgccagcccgacagggatttttccgccagggtaaagctgatgttcgaccagccggccttccacacgatccaacccgccagtgcaaacatgaccgcgtagaccaccggccctgcccaatctataaaacggcggatggactccatgcccgcccagaacaccgccgcttgcaacacccacaggctgaggaaaccaaaccagccaaggtaggacaggcctgcaaaatgcggctctgcatacaccgccatctgtgggaagaagcgcagcaccacgatgatcaaggcactcgacgccaggtacgtctgaatcccgtaccaggccacggcgatcaagccgcgaatcaccgccggaatattcgcgccgaacacaccaaacgccagccggcagatcaccggataaggcaccgcagcctgctggctcggcttggccaccaggttggcgatcaactgcacgatgcaaatgcccgtgagcaacgcgatcaacacctgccaactggccagccccagggcgaacaggctggcggcgaacacatagccgccgacgctgtgcacgtcgctcatccagaaggcgaagatgttgtaccaagtccacttctgcggcagcgggcccaagtcctggttgtacaggcgcgggctgtagcctttgggcaattgttcggtcatcgctgggctcctcgaaatacccgcctgcgcttccgtcgcagggtgcatacgggaggcggcatggtttgtatacgagacagtcagcagaatgcgtgccaattgaacgcaatccctctggcacggcgctccaaagggttgataagcgcgtatagggtggcgctacgctcagcaacggtgcacgtagatcctgtacacaatcagcggtgcactcgttgtgcacacaggtaacccaccgtgcagcatgcggcggtcaggaacgtcccccatgccatgtccatgatcgccaattgcgcggaccagccttgcagcgtggcccagttactcaggtcataggtgccgtaggcgaccaggccgagcaaggcgcccaggcgcgcggcgcgttgccaacttgcactgggcaagaccacgaacacgacgcaaccgagcacataaaggagatagaacagcgttgccggcaacagccgaggttgatccagcatcagtggacccaacagggacttataggtgggccccatgatgacgccgagccagaggccatccagaatcaggaaggcgagcaacgtgccaaggtaggcgaacagcgttttcttattcattgaggcgacctctgtagacgccaatgggcgcctacagaagagcaaaacgcactcagcttagttcaatgcgatccgcatggatcacgatctggccctgcttatacagcgcaccgatggccttcttgaagttgcccttgctcacgccgaacaagttgctgatcaccgcggggtcgctcttgtcactgaccggcaaggtgccgttgttttcacgcaacttggcgaggatcttcgagttcaggctggaggccgcttcctggccgaccggttgcaggctcaggctgatgttgccgtcggcgcggatctctttgataaagcctttttcttctttgcccgggcgcaggaacttgaacacttcgttcttgtggatcaggccccagtgcttgttgttgatgatcgccttgaagcccatgtccgtggcttcggccaccagcaggtcgacttcctggcccacctggtagttggccggtgtcttgtccaggtagcgatccaggcgcgcggtggcggtgatgcgcttggtgtgcttgtcgaggtagacatgcaccacgcagtattcaccggcggtaagctggcgcttttcttccgaatacggcagcagcagatccttgggcaacccccagtcgaggaacacgccaatactattgacttccaccactttcaaactggcgaattcgccgacttgaactttgggtttttcagtcgtggcgataagtttgtcatcgctgtccagataaatgaaaacattaagccagtcttcatcttcactgggaatatctttggggatataccgattgggcaagaggatttcgccatcttgcgcaccgtccaggtacaaaccaaagttagtgtgtttaaccacttgcaagctgttgtagcgcccgactaaagccatgtccaataccctcattacgtgggcggcattctacccgagttgcgctcgccacgcgcgcgcgcctgaaaaatcgcgggctggcgtggccttccgatggcagtgccccgctcgtccgatcaatcggctgaattttccatggttggcaagcgccacccgcccccatggtttcgagttaaaacagtaagttaggggcttattgataagatgaacttcggcgatttccggccgccgtacttattctcaggggatatttaccaagcaattgtcaagtatttcctgtacgatgcctggccaagttaattttctacaggttagtggccgccatgcgcgtaaaagcatccaacagcaaagcaaagccagctcccgccgttgaaaccagcgagtcgatcaacagccagattgcggcgttcctcaagtccggcggcgaaatccagcaaattgccaagggcgtaagcggccagactttcggcccgtccaagcagatcagcctgggtaaaaagtaataccgcgcaacccccctggtccctaagcgtcttgactctcaaggcgctaggactagagcccgaaataccccttctgtacctctaatcgacgaacgggcctcaccgcctggcattcgccggtatgcttgcacacgtctagcacgggcatctgcccgattttctccgtcactgctcctcgcttttcatggagtgaagcatgttcaaaccctgcatcttcctggtctttgccctggttgccagccctctcgccgaagcgcagatcttccagcgcgaattgggcgacttcgacctgaaattgggcaccacgcctagccgcagtatggcccaaggcctggtcaagccaacctcccccggcagtgactcgttccatggcgggctggacctgagccacgacagtggcctgtacttcggccagttctcaccgaacatgggcttgtcttcgtccagcaacctcgaagtcgattcctacatgggtttcaaacaccccttcgaccagaccctgggctacgaagtgggcctgatccactacagctaccccaagctcagccctctcgacagccaggagttctatggcggtctgaacctgttgggcaaccgcttcggcgcatccttcagcaacgaccctgaccgccaggacagtaccctgttcgccgacctcggtggcacacagccatttggcattggcgtcagcatgaaatacaccacccatcagttgggcaccccggtgtcggtggacggcggctccattcgcagcttcagcgactggtcggtgcaattctcccgggaatggatgggcgttgacctgaacctgatctacagcgactccagcctcagcggcggggattgctcggcctattccggacacaattcgcaatgcgatggcctgttgacgctgaaggccgcacggtcgttttattgatgggctgaactgtcgcacccggcgcaggttcacatgtgatatcccactctgcgaaggacccgccatgctgcgtcggctaaaactactggtgctgttgctgaccctgagcctggtgctcgccggctgcaatcgcgtgggcctggcctaccgcaatctggacgtgatcatcccctggaccctcaacgactacctggacatgaacgccgggcagaagagctggttcaacgacaccctcaagcagcacctggcctggcactgcaccacgcaattgccgggttacctggattggctggaccgcctgcaacagatggccgacgacaaccacgtcaccgacgccgccttgcaggcccgtaccgccgaagccaagcaggccatcgacgacatcgctcgagagatcactccctccgccatccagctgcttcaaggcctggatgatcagcaggtcaaggacatgaacgacgcgctggccaaggacttgcgcaagcgccaggacgaatacctcaagccgcccctggcccagcagatcaaggaacgcgccgagcgcatgagcaagcgcctggacgcctggatcggcccgctcagcgccagccagcagagccgcgtgaccgcgtggtccatcgccctcggcgagcagaaccgggaatggatcggcaatcgcgcccgctggcaggcgcaatttatcgaggctgtgcaacagcgccgcagtgccgatttcccgcagaagatccagcagttactggtggaccgtgaaagcctgtggaccccggagtacagagcggcctacgcccagaccgaagcggcggcgcgcagcctgattgtcgatgtgatggccgaaagtacgctgcaacaacggcagaaactcacccagaaaatcgacaaggtgcgcagtgatttccaggcacttaaatgcttgaagagcacgcagtcctaaccgggcgccaacgtccccagccaagccaccagcgccaggatcaacaccactgcggcagactccaacacaatgctgcggcgcagtgctttgcttgccacggtaatgtcgcccgccgccagggcgcgttgcagcaacggcgtgaagtgcgagcgattgagcgccgccagccccagcatcaaagcgaacaggcccaacttgaaacacaacaggaccgcgtaggtgccaccggtgatgccatcgagcttcggcccgaccacaaacagataattcgccacgcccgtgccgatcagcaccgctacgaacagcatgcccatccgctcgaaagccgccagcgcgtgtgccaacctgtggagcgtcgacaaagacgtgctcctcaacgccaccccgaatgcagccaacgcaccgacccaacccgccgccgccagcaggtgcgcactgtcgctgagaacgtgccataccccctgcgtgccttcatgcatcacgccgtgccccgcccacgccagcgttaccagcgctatcgcaccgaacagcggtgccattcgggtattgagcgcaaccagcgccaacgccaccattcgcaggcaccaggtccaccccagctcggtctgccagagcatcatttgcaggtgcggccacaacatttgccaatcttcggcgccgctcatggcctgggtcatgaacagcaacgacgctaccgaaagcaatccacccaggcacgcagtcagtcgcaacagcgactgcagattcaataggcggcggtcgccatagaggccgaacaaccccaggccgaacaccagcatcaagtccagataaagcgcaaaacgcaggagtatcgagaccgcttcactcatggctggacgctgaacatcacattacccaggatcgggtgcgtatcggacgacaccgcgcgccaatccacccggtaagtacccgccgtcagcgcggacgccggcttgatcagcatcaccttgggatcggtactggccgcgacactggccttcaccggcatcggcgaatggaacatgccgggcatgtcagtcatggtcagtttggcaccggaaaactgcgtcagcaggttttccgagaagcgcagttcgatcacggccggcggcgcccccttggccccatccgatggtgtagacgacagcagcttcggatgagccgataccgccaggctggtaatcagtccggcgcacagcacagtagttttcaacaatgacatgcaaggctccaggccgctcatggcggcgagtaagttataggatgggtaaaaccgtcagaaccacattcgcacaccaaccacccagcgccattggctgatgtcttcgccttcatcccgggcgtattgcgcggtctggccgtagctgcggttccagctgacgcccacgtagggcgcgaactcacggcgcacttcataacgcaacctcaagcccagctcactctccgacaggcccgagccgacgccgcgctgtgggtcgttgcgtccatagaagttgagttcagcggtgggctgcaggatcagccggttggtcagcaggatgtcgtagtcgccttccaggcgagcagcggtacgacccgcctcaccgacaaacaacgtggcttcggcttcgaagttgtacagcgccatgccctgggcgccgaaggccgcccaggtctggccgtcgcctggcttgaagtcctggcgcacgccgcctaccaggtcccaccacgggctgatggcatgcccccacagggcctggacttcggcgctttcagtgcgaccggcactgcgctcgccttcgctgcgtagccacaggcggtcgatatcgccgccgacccagccgttgatatcccagttcagcgcgcctgcaccgtcaccgccctgccattccaattggttgatcagcagcaaagagttgatgccactgtcgtgaaccctgtgcccaccgggggcgttgtacaccgccgcgcgatcagcatcggtcagggcaggaatcggtgtccggctctcggtgagcgccggtgacgccgggctcatgccctggaactcgtcggcctgcaccaacggagcgaacgccagcccgataaaggcgaataaaacacgatggctcatgcttgcgtccttactcatgcacgcgcacctctcggaacatgcccatttccatgtggtacagcaggtggcagtgataggcccagcgccccagcgcatcggcggttacccggtagctgcgccgcgagcccggcggcatgtcgatggtgtgcttgcgcacctggaactggccgttttcatcctccagatcactccacaagccatgcagatgaatgggatggctcatcatggtgtcgttgaccagcaccagccggacccgctcgccataggtcaattgcaagggttcggcgtcggagaacttcacgccattgaacgaccaggcgaacttctccatgtgcccggtgaggtgcagctcaagggtgcggctggggtcgcggccgtcagggtcttcaaaggtgctgcgcaagtcggcgtaagtcaggacacgccggccgttgttgcgcaggccgatgccggggtcgtcgagcttgggcaccgggttcatggcctgcatgtccaccagcgggttgccttgctcgctggccggatgggcctgcatcgacatggcgcggtgatccatgcccgccatgcccgccatgcccgccatgtccggcatatccgccatggcgccgtggtccatgccgcccatgcccatgtcgtccatggtgatccaggggcgcgggtccagcgccggcaccgacgcgattgctcccgcttgaagggccagcgtgccgcgggcgtaaccactgcggtccatcgactgcgcaaacagggtgtaggcggccgcggtaggttcgaccagcacatcaaaggtctccgccacggcaatgcggaactcatcgacactcactggctgcaccggctggccatcggcggcgatcaccgtcattttcagccccgggatgcgcacatcgaaatagctcatcgccgagccgttgatgaagcgcaggcgcagggtctcgcccgcccggaacaggccagtccagttgcgttccggtggctggccgttgagcaggtaggtgtaggtctcgccgctgacgtcggccaggtcggtggggttcatcttcatctgcgcccacatcaggcgatcggcggcggtggccgaccagccctgcttgcccacatcccgcacgaaatcgcccacggtgggtttgtgcaggttgtagtagtcggactgtttcttgagggttttcatcagcgcaaccgggtcttcatcggtccagtccgacagcatcaccacgtagtcacgttggtaagtgaagggctcgggctccctgggatcgatcaccaacgggccatacacgccctgctgctcctgaaaccccgagtggctgtggtaccagtaggtgccgtgctgcttgagcgtgaactggtagacaaacatcccacccggctcgatgcccttgaagctcaagcccggcacaccgtccatggacgacggcaggagaatgccgtgccagtggatcgacgtcggctcggccaggcggttcttcacgcgcacggtgaccgtgtcgccttcgcgccagcgcagcaaggggccaggcaggctgccgttgatagtcagcgcggtacggttgcgaccggtgaggttgactggcatctggtcgatgaacaaatcaaattcggtacccgccagcacggtgggctggccgggactggtgagcgcccagaccgggctgcgccagagccctagcccgctgagcaagccgccggcggccaggcctttgacgaaggttcgtcgggtggttgtggggtgcatgccgattcaattccatgagttgaatggcagcagattaagcacggccggctgtcagccagcttagcggcagattaccgatctgacagtttcgccccggctttgcgacagtgccggggcgtgaaggggatcaggcgatctgcgccttggaggccacctcggcaaaggtcgtcgggtcgagcgcatccgcctgctcgtccagcacctgacgcgggtgatcgttgcccggaatcgaactgtcgatcagcgccagcaactgtgcgccgagcggggtcaggataaaattctcaccattgccgccctcctcttcagggcgcgactcgatgaagccgcgcttgaacaacagcgcttcataatctgccgcggtcttcttgagcgcgtccaggttaccggtgggctcgcccgcggtggccttctcggccgcttcctgctcggcgtatttgcgtggggcgaagctgccctcgccgttctgcacttcatgcagcagacgttcgatcagatcccagttgtaagtcgtcatcctgattcctcctgcaggcgggtggaaaatagcctgtctaggggtgtgacacgccctgtcggtcaccgttcagccggatagacggacgtcatttctctgaactttccagacgttcgcggcctcaacagctcatatccgccaaggaggtgtgcccatgaaaaccctgatgaacctggccgtcgcggccgcgctgtttagcgccctgcccgcctgggcctgtacgcccgacgaagccacgagcaagcgcgagcaattggctcaggaagtgaccaggctgaccgaacagaatccgaccaaggccaaggagatcaacgacgaactgcagaagatggacctggatacggaaagcgcggagttccccgacaaatgccaattgatcgacgcccgcctcaaggaactcaaggaagccgccgccaaagccaaaaactgagggcataaaaaaaccggacaatcgtccggttttttcacatcacccgcgccttagtcggcagccggggcttccggcttgcggcgcttgagcggtgccatgccgtccttgctgacgagcgacaggttgtcggtcttcggccggttggcgatcttgcgtttggtcggcgacttggcgccggttttcttcttgtcgcccttggcgtcggtctttttcttcttcacaccaacggccttgcccgatgccttgaccttcttcggcccggtgtaggtgcctttgacttccttgatggtgcggcgctcgaacgactgcttgaggtagcgctcgatgctcgacatcaggttccagtcgccatggcagatcagcgagatggccaggccatcgttgccggcacgcccggtacggccgatacggtgcacatactcgtcgccgctgcgcggcatgtcgaagttgatcaccaggtccaggccgtccacgtccaggccacgcgcggcaacgtcagtggccaccagaatcttcacgccgccggccttgaggcggtcgatagccagcttgcggtccttctggtctttctcgccgtgcagcacgaacgccttgtactcctgggccaccaggcggccgtagatgcggtcggcggcggcgcgggtgttggtgaacacaatggctttctgataggtctcgttggccagcagccagttgaggatctgctctttatgcacgttgtggtcggcggtgacgatctgctggcgcgtggtcgcgttgaggtcgctgacgttgttgacctgcaggtgctcagggttgttcagcaccttggcgaccatctcgcgcagggtggaaccgccggtggtggcggagaacagcatggtctgctggcggttgacgcattcgcccaccaggcgctgcacgtcgtcggcaaagcccatgtcgagcatgcggtcggcttcgtccagcaccagcacttcgacttccttgaggtcgaggttgccggcgttgagttgctcgatcatgcggcccggggtgccgatcaggatgtccggtaccttgcgcagcatggcggcctggaccttgaagtcttcaccgccggtaatgatgccggacttgatgaaggtgaactgcgagaagcgctccacttctttcaacgtctgctgggccagctcgcgggtcggcagcaggatcagggtcttgatgctgacacgaaccttggccgggccgatcaggcggttcagtacaggcaggacgaacgcggcggtcttaccgctaccggtttgagctgtcacccgcaggtcacgcccttcgagcgcgagcgggatggccgctgcttgcacaggcgtaggctcgacaaatttaagctcggccacggctttgagcaggcgttcgtgcagggcgaattgggaaaacacgggtgctacctcgaagaaatacaaaaaatcagctgcataggttaccggtttcgggcgcccaaaccgagtttctttacgcgaacggtgctaatcggccgcttttttgtcaggacatttgtccacgacgtcaactttgttgcacttaaatgctctaatcgccccgtcttgtcccacagaagaatcggtttcacccatggatatcaaacagctctggctcaacgcccaggacctctggggcgccctcgatgaacacccgctgctgcacgccagcctcggcttgctggtgttgctggtggtggcgctggtgctcggacgagtggcgcgctacctcattctccacgccgtcaaactgcttggccggcaaccgtccctgcactggctcaacgacctgcggcacaacaaagtcttccatcgcctggcccagatgacgccgtcactggtgatccagttcggcctgtacctggtgccggacctgagcaagaccgccatcctgttcatcggtaacgtggccctggcattgagcatcctgttcctggtgctggccatcagcgccctgctcaacgccctgctggacatctacgcccgcaccgaacacgcgcgtacccgctcgatcaagggctacgtgcagttggcgaagatggtgctgttcgtgtttggcgcgatcattatcgtcgccaccctgattgaccgttcaccgctgttgctgctgtcagggcttggcgccatgtcggcggtgatcctgttggtatacaaggacacgctgttgtcgttcgtcgccagcgtgcaattgaccagcaacgacatgctgcgggtcggcgactggatcgagatgcctcaggtcggcgcagacggtgatgtagtcgatatcaccctgcatacggtcaaagtgcagaacttcgacaagaccatcgtctccatccccacctggcgcctgatgtccgaatcgttcaagaactggcgcggcatgcaggcctccggcggacgccgcatcaagcgcagcctgttcatcgacgccagcggcgtgcgcttcctgcgcgacgacgaagaactgcgcatgacccaggtgcacctgctcaccgactacatcgggcgcaaacaggccgaactcaaggcctggaacgaagcccaggggcacagcgcgcaactgtcggccaaccgccgccgtatgaccaacctcggcaccttccgcgcctatgccctggcctacctgaaaagccacccggacatccagccgaacatgacctgcatggtgcgccagatgcagaccactgcccagggtgtgccgctggagatctactgcttcacccgtaccacggcgtgggcggattatgagcgcatccagggggatatctttgattacctgctggcggtgttgccggagtttggcttgagtttgtatcagcagccgagtggtaatgacttgcgtgcgggggtgttgccagcggtgttgggggccagtcacttgcctgcaccagaaaaagccttgagctagaacgcttcatttccagggatgggctgcgtggcctgacgcttcgcagcctccctccagtgactccaatcgatcagtgcagtcggaagtcgatcgtgactttttatccagacacacagacctggatcgatccactgtacgatttccgtgatatcccgatgcagatcgaacagcggttgccacaggagcggctcatgatgaaaacaacgatttcgtagatcccgcgcattgttcagtcgactgcggatgacgtccgctttcttggcgttcttcgggcaatagaaaaataccttcatcaacggcttcgaaacatccgggaacgatttacggttgaacagcgaggtccagaagccaaagctcaactcggcggtaatgtcgtcaggaccagggtccacacctcttttattgagcgccgcacgtgcgtcgtccactttttgatagctggaaagaagctctgcgttagtgcttaccctgaaggcctcgtaccaatcgtcacgcccgtactcgcgtaccatctcgcgctgaatagcattgcgcagccccacttcaagcacgtgaaaaatcgacaccagggactctgcgatccgcatattgtgcacgtaggcagcggcagcgtgctcttggttgccctgatgccccataagatagcggctcattcgtggtgtggagagctttgcctccagtgtttgccagaccattacccgccacctcccttcagcgcaaagacatgtacaagcgcgagcgatggtgcaggcagattttttcgcctgaaataaacacactattgccaaacaatgcagccgacctacatcgatgccaggtggggttgacgtaaaaaccaaggctggtaatctcaccccgcagccctaggaacctccactcccgtgcgagatgaaacggtgacgagactaggttatgtgacggccccgctctgcggggcctcctcatttctggcgatccaacttttcgctacgactcgtttttcaccgcacgactgttcagttgatggcccaaccgactgatccacaccgcccccagaatcaccaacccacccagggccaaccgccccagcggttcatgctggttccagatcagcaaattcaacagcagccccaccggcacatgcaggttgttcatcaccgccagggtgccgccctgcaccaggcaggcgcccttattccaccagtacatgcccagcgctgtactgaccaggccgaggaacaccagcacgccccattgcagcggcgcctccggcagaaagttggctttgccgaacagcaggaatgccggcaacaccaccagcaacgcgccgaggtagaagtaaccgaagcgccggtagtgcggcagattgctcgggtaacgcgccaccaggtgtttgtacataacttgcccggcggcataggtgaagttggccagttgcagtagcaggaagccaccaaggaagtgcggggtgatctggtcgaagcgaatcactgcggcgcccgctaccgccaccagtgcggcgaccagcgcccaggggttgaagcgacggttgagggcgtcctcgataagggtcacgtgcagcggcgtgagaatggtgaacagcaacacttccggcacagtgagtacacgaaagctcagatacaggcacacgtaagtcacgccgaactgcagcgcgccgatcaccagcatgccgcgcatgaaggccggttccaccgagcgccagcgggtcagcgggatgaacaccagcccggccagtagcacgcgcaccagcacggcgaagtagctgtcgacgtgaccggcgaggtattcgccgatcaagctgaaggaaaatgcctgaatcagggtgacaaccagtaaatagcccatgcgcgcctcgtttcgaatgggcgggacattaaaggttttcggcggttgaagaaactcggggcaaaaaaaacccgacctcgctaaagcgtcagtcgggcggtagcactcaggagcaatagtgcaaagggaggttcgttacgcgtacttgaagggttggcgtgaagcgatataaacaccgcgcgattatgtgacgattaaaggatcaagccacctgagccagcagcgctttggcgtggttgatgcccttttcctggaagtccccgctcaggttcaccccttcggcatgaatgaaggtgacgtcatgaatcccgatgaaggccatgacctgacgcaagtacggttcctgatgatctgagctggcgccggtgtggatgccgccgcgagcagtcagcacgatggcgcgcttgccggtcagcagaccctgggggccggtggcggtgtacttgaaggtcacaccggcacgcaacacgtggtccagccaggctttgagggtgctggggatggcgaagttgtacattggcgcagccatcaccaggacgtcggcggcgagcagttcgtcggtcaatgcgttggagcgatccagggaggcctgttcgttgccattgcgctgatccgccggcttcatccagccgccgagcaggttggcatccaggtgcgggaccggattgagggccacgtcacgtacggtgatctgatctgccgggtgggcggcctgccattggctgatgaactgttgggtcagttggcgggaaattgaatcctgctggcgggcgctgctttcgatgatcagaacgttggacatggcgttgtaggctccatctgtaattgctgtaagtcgatggagtgaagattaaacagagccaattcgattaaaaagcgcaaaaaactgctataacccatctataaatttgtttataggcggagcatgctccgctctcgggttatttcggcgtgcaggccagggcgatacgcatcttgataatcgcgcggttgaacttgaccgtggtgttagtgcttttgcccgccggcaccgtgaccgtacggcgacgcggcgattccgggccgttggtgaaggtcaccgagcacacagcatcgtgggtgccgtagttattgagttggatcgagctgatatcgccgtccacgtcggaggcggtgtaatcgatgctcacaccgtcgatcttcttggtcacgtcgatggggtaggcaaacgcgctcatcggcagcagcgccagcaacacacaacagaattttctcattcggcagtctccaataaggacagccagcttaggacaagaggagcccatcttgaaagcgccccgcgttaccctcgatcaatggcgcacgctgcaggctgtggtcgaccatggcggcttcgcccaggcggccgaagcactgcaccggtcgcagtcctcggtgagctacaccgtcgcccgcatgcaagaccagcttggcgtaccgctgctgcgcattgacgggcgcaaggcggtactcaccgacgccggtgaagtgctgttgcgccgctcccggcaactggtgaaaaacgccagccagctggaagaccttgcccaccatatggaacagggctgggaagccgaggtgcgcctggtggtggatgcggcttaccccaatgcgcgtctggttcgcgccctcaccgcattcatgccgcaaagccgtggctgccgcgtgcgcctgcgtgaagaggtgttgtcgggcgtagaagagttgctgatggaaggcgtggccgacctggcgatctgcgggttcagcatacccggctacctcggtacggaaatgagcgatgtggagtttgtcgccgtggcgcacccggagcatgcactgcaccgcatgaaccgcgagctgagtttccaggacctggaaagccagatgcaggtggtgatccgcgactccggccgccagcaacctcgcgacgtgggctggctcggcgccgaacagcgctggaccgtcggcagcctggccaccgccgccgcctttgtcggcagcggcctgggctttgcctggttgccccggcacatgatcgagcgcgaacttgccgagggcgtgctcaagcaactgcccctggaacagggcggcagccgccaccccacgttctacctgtattcaaacaaggacaaacccctggggcctgccacgcagatcctcgtggaactgctgcgcacctttgataccgcaccgctggacgcgcctttcgccgccccccggcaagcctgaaacggagttcgcccatggcctggttcgaccatgaaggatgcagcctgcactacgaggaatatggtcacggcgcgccgctggtgctgatccacggcctgggctccagcagtcaggattgggaactgcagattccagtactggcccggcattaccgcctggtcgtggtggacgtgcgcggtcacggccgctcggacaagccgcgcgaacgctacagcatccagggtttcacctatgacctgatcgccttgttcgagcacctgggcctgccaccggcccacgtggtgggcttgtccatgggcggcatgatcgctttccaactggccgtggacgaacccgcactgatcagaagcctgtgcatcgtcaatagcgcccccgaggtcaaggtgcgcagcgctgacgattactggcaatgggccaagcgctggagcctggcacgcttgctgagcctgtccacgatcggcaaggcgttgggcgagcggctcttccccaaaccgcaccaggccgagctgcgccgcaagatggccgaacgctgggcaaagaacgacaaacgtgcttatctcgccagcttcgatgcgattgtgggctggggcgtgcaggaacgactttcgcggatcacctgtccaaccctggtcatcagcgccgaccacgactacacccctgtggcgcagaaacaaaactatgtaaaactgctgcccgatgcgcgactggtggtgatacaagattcccgccatgccacgcccttggaccaacccgaagtctttaacgcaaccttgctcgattttctaaagacagtcgaaaccactacccaggatcactgacccatgctgaaaaaaatcgccttctttgccggttctgttctgttcgccgccaacctgatggccgccgagcccgccaaggcgccccacgttctgatcaccaccaccaacggcgacatcgagatcgaactggacccggtcaaggcgccaatcagcaccaagaacttcctggcctacgtcgacaagggcttctacaccaacacgattttccaccgtgtaattccgggcttcatggtccagggcggcgggttcaccgcgcagatggcgcagaagccgaccgacgcgccaatcaagaacgaagccagcaacggcctgcataacgtgcgtggcaccttgtcgatggcgcgtaccaatgacccgaattcggccaccagccaattcttcatcaacgtcgccgacaatgcgttcctcgacccgggccgcgatgccggttacgccgtgttcgccaaggtggtcaagggcatggacgtggtcgacatcatcgtcaactcccagaccaccaccaagcagggcatgcagaacgtgccaatcgatcctgtcctgatcaagtcggccaagcgcatcgactgatgcctggcaggcagctccgcgcgcagcccacaaggccgcgcgcgcatttgtaaaaggagagcccgcacggcgggcgtcaaactgaatgctctatcgtcgctttgaacaactgatcgacatcttccgcgacgccccgagcgccgccccgcctgataaagtcctgcctttctacctctactacctgcgccaggtttggccgcattttgctgccttgctggtggtgggcctgatcggtgcgctgatcgaagtggcgctgttcagctacctgagtcgcatcatcgatctggcccagggcacgccgccggccaacttctttcagattcacagcaccgagctgatctggatggccgtggtcgccctgctgctgcgcccgatcttcggcgccctgcatgacctgctggtacaccagaccatcagccctggcatgaccagcctgatccgctggcagaaccacagctacgtgctcaagcagagcctgaatttcttccagaatgacttcgccgggcgcattgcccagcgcatcatgcaaaccggcaattccctgcgcgattccgccgtggcagcggtggatgcgatctggcacgtggcgatctacgccatcagttccctggtgctgtttgccgaggccgactggcgcctgatgatcccgctggtgacctggatcctctgctacagcctggcgctgcgctactttgtgccaagggtgaaggagcgctcggtgatttcctccgaggcgcgctccaaattgatgggccgcatcgtcgacggctacaccaacatcaccaccttgaagctgttcgcccatacccgctatgagcaggagtacgccaaggaagcaatcgtcgagcagaccgaaaaaacccagttggccagccgcgtggtcaccagcatggacatcgtgatcaccactatgaacggcctgctgatcgtgaccaccaccggcctggcactgtggctgtggacgcaatcgatgatttccgttggcgcgattgccctggccaccggcctggtgatccgtatcgtcaacatgtccggctggatcatgtgggtggtcaacggcattttcgaaaacatcggccaggtgcaggatggcctgaagaccatcgcccagccgctggccgtgatcgaccgcgacaatgccccgcgcctgagcgtgccccagggccaagtgcgtttcgagcaggtggatttccactacggcaagaagagcgggatcattggcggcctcaaccttgagatcaaggccggtgaaaagatcggcctgatcggcccgtccggtgcgggcaagtcgaccctggtcaacctgctgctgcgcctgtacgacctgcaaggtgggcgcatcctgatcgacggccagaacatcgccgacgtcgcccaggaaagcttgcgcgaacagatcggcatgatcacccaggacacgtcgctgctgcatcgctcgatccgcgacaacctgctctacggtaaacccgatgccaccgacgaagagctctgggccgctgtgcacaaggcgcgcgccgatgagttcatcccattgctgtcggactccgaaggccgcaccgggctggatgcgcatgtgggtgagcgcggagtgaaactctccggcgggcagcgtcaacgtatcgccatcgcccgcgttctgctcaaggatgcgccgatcctgatcatggacgaagccacgtcagcgctggactcggaagtggaagccgcgatccaggaaagcctggaaaccctgatgcaaggcaagaccgtgatcgcgatcgcccaccgtttgtcgaccattgcgcggatggaccgcctggtggtactggagaaaggccagatcgccgagagcggcagccatgccgaactgctggcccatggtgggttgtatgcgcggttgtggcagcaccagaccggcggcttcgtcggtatcgactgacccttacaacccctttccgatccaacctgtgggagggggcttgcccccgatagcggcagatcagtcaccggatacagcgactgatactccgccatcgggggcaagccccctcccacattagagccctggatttgtgccatagccgtgctgtactcagtgcagtgcccagacgggcgctgaagtaaatctgcagggagcatcactgatttacggatccggtagagcgatctatcaaggacgggttgcatgtctttgttcaagcgttcagtcacagaggggttaggtacgttttggctggtgttaggcgggtgcgggagtgcggtattggccgccgcgttccccgcagtcgggatcgggttgttgggcgtgtccctggccttcgggctcacggtgctgaccatggcgttcgccatcgggcatatcagcggttgtcacctcaacccggcagtatcggtggggctggtggtgggcggacggtttccggccagggagttaccggcgtacatcgtcgcgcaggtggtcggtggcacggtcgccgctgcgttgctgtacttcattgccagcggcaagccggggttcgaactggcgtcaggcctggcgtccaacggctatggcgagcactcgcctggcggttattcgatggcggcggggtttgtctgtgagtgggtgatgacggcgatgttcgtgctgatcatcctcggcgccaccgaccgccgtgccccgccaggccttgcaccgatagccatcggtttggcgttgacgctcatccacctgatctctattcccgtgaccaacacctcggtcaacccggcccgtagcacaggcccggcactgatcgtcggcgggtgggcgatccagcaattgtggatgttctggcttgcgccgatcctgggtgcggtgatcggtgggttcacttatcgatggctgggcaaggaggcgccgggttgaggcaaacgggttcagccctgccgataaggcagggctgcccttgcctcctgtgcatacgccacgatccccacccgttcacgctcgagaaaatcctccacggcattcttcaatcccggatggcgcaggtagtgccacgaccgcgtgatcaccggctcgaaccctcggatcaacttgtgctcgccctgtgctcccgcatcgaagcgttgcaggccttgggcgatggcgtagtccataccctggtagaagcaggtttcgaagtgcaaacggtcaaactctgccaggcagccccagtagcggccgtagaagctgtcgccgccgagcaggctgaaggccatcgccaccgggcgcgagccttgcttggccagtaccacgcggatcgcttcaggcatgcgctcggccagcaggctgaaaaaagcgcgagtcaggtagggcgattggcggcgcacggcgtaggtgttggcatagcaggcgtagacaaaatcccactgcgcctcgctcagttcatggccttgcaaccactcgaaatcgatcccctgccccgccacttgctcgcgctccttgcgcatctgtttgcgcttgcgcgaactcaaggcgtcgaggaagtcctggaagtcccggtagcctcggttctgccagtgatactgacagcccaggcgctgtaaccaacccggttgccgggccagtgcagcatcggccaggtcatcggtgaagttgatatgggcgctggaaagcccttcgatctccaggtaacccggcaggctcttgagcagctcaaaaccgtcttcggcactggcggccaatagacgcggaccgctgaccgggctgaaaggcaccgccgtcagcaacttggggtaataatcgatgccggcgcgctcacaggcatcggcccagccgtgatcgaacacgtactcgccataggaatgccatttgcgatagctgggcaacgccgccaccagccgctcaccctcccagtgcagcaaatgctccggctgccagcccgattgcgggcccaggctggcgctgtcttccaaggcgctcaggaacgcgtgccgcacgaacggctgcccctgcggcaccagcgcatcccaggcttgcggggcaatttcggacaggctgtccaggcgttgcagcggcatcggcatcctcactggttcggggcgtgaaagcctggcgagtatcgccgattgccgaccctggcacacccccgtttcgcacgacaaggctctaaaccaatagttccgaacgtgaaaaatttgtcatctagatgacatcacttcgccactgcgccgtcataaacgatcgtgatactgacgcctgtttttagagcgcctggttctacccggcggctatttttccgtccgtcatcggtcggttgtgtcctggatggtttgccatccctcctcactttcggagattgatatgcgtcttgcttccactaaaactgcggcggtcctgtgcggcggcctgttactggccctgagcgttccggccagcgctgcagtcgacgctaaattgctcgacatgctcaaggccaacggccagatcaccgcggcgcagtacaccgaactgcaaagcgagctggccaaagaccagaaagaacagcagatcgcacggcaagctcaacaagagaccaacgaacagatcgcggccaccgcgaagaaaaccaatgagctgagcagcttcgaccagaagctggcctgggccgccaagactcagttcaagggtgacgtacgtttccgtcaggaaaccgtgaaaatccagggcgaatccaacaacggcggccgcgacaaggaccgtcagcgcatccgtgcccgcctgggcgcctacaccgagatcaactcgcaagtcgacaccggtatccgcattgccaccggcagcagcgacgatgcgcgctcgaccaaccaggaccaggacaactatttcgacaagaagtcgatctggctggaccttggctacatcgactaccacccggaccagatcaagaacctgcacgtgatcggcggcaagatgctgcaaccgtgggtgaacatgggcgacgtcatctgggatagcgacatcaaccctgaaggcctggccctgacctacaaatacccgctgggcagcagcgccgagctgttcggcagcctcggtaactacaacctcaaggacaacgtcgacggcgatggcgtgcaattccgccacgacctgcgcctgacctctggccagttgggcacacgcttctcggtcaccgacaacctgaaaatgaccctgggcggcagcatctacgcctaccagaacgacaaggacagccgttgcacaaccaccaccacgccttgcgcactggcggtcaacggtaactcggccgacaaccagttccgcctgtatgaaggctttgcccaagccgacatcggtggcctggctgtaccgctggcgttctacggccagtacgtgaaaaacaacgacgccgtgaccgaccaggacaccgcctggctgatcggcgccaagtcgaaagtgttcggtttcaacctggactacaactaccgcgacatccagcgtaatgccgtggttggcgccttcaccgactcggacttcgccaacggcaccaccggttcgcgcggtcacaagatgaaggtcagctacgacatcgacaagaacttcgccctcggtgccacgtacttcctgaccaaggccgactacgccagccgtacccagcgtgacgccaataccaacaccctgcagctggatgcagaagccaagttctaacagtaagtgttgaaagccttgggccaggacgacccgaggtggctgtaccagtcttgcgtgagtggatcggtccccatcatccgttcgctccacccacgcgagcctgtttattccccgcctttgtgatccttgagccgctcgtcagccagacgctgcgccaaggcctccacaccctctaccggctcatccggcattatcttcagcgtcgcctgcatcaggcgcatctggcggataaaccggcggcagttcgggcagaacatcaagtgatgacgcaccagcagacgctcgcgaaaggtcaactgcccatcgagatagtcactggaacgtgccacttgttctttacaggtcaacattcgcccgtttcctcaaaatgctccaccgtggcgaagactttaagccgtgcccgatgcaacagcacacggacattggagagcgacaacgtcagaagattacagatctcttccaactccaggccctgccgttcgcgcagcaccagcacgctgctttgcaactccgacagactcagcaacgtatgctccaggcatttgcgcagttcatcttcggtgagcagggcttccggggtgtcctggtgccaggcgtagggggcgacggcccaatggccatcgtcaggcgtgaagcgatcatcaccgatggtgccgtggggcgaaggcagatcgtcgagcagcacttcgcgacgattctgcttgtagcgccccttggcagcgttggcggtaatggtcagcagccaggtcttgaggctggaacggccctcgaacctggccaggttgcgcaccaccgacagccaggcgtcctgcaccacttcgtcggcgtggcgctggccgacgatggcataggccaccgcccgcatggcgctctggtaggtggtgaccaattccttgtaggcccgctgctcacccttgagcaggcgttcaagcaggtgcgcgtcgtccgctgctgccattcaagacctcgattgtcttagcgtttgcgcaggatcacgctgccgatcgaatagcccgcgccgaacgaactgagcaccgccacggagcccttgggcaggtcatcctgattcttgtggaacgcaatcaccgaacccgccgagctggtgttggcgtaggtatcgaggatcaccggcgcttcttccaccgtggcttcgcggcccagcagtttcttcacgatcaggtggttcatgctcaggttggcctggtgcagccagaagcgcttcacatcggtcacgttcaactgattctcttccaggtgcacgccgatcagctcggccaccatcgggcatacgtcgcgaaacaccttgcggccttcctgtacgaacagtttgtccggcgcgccgatgccttcttccgcggtgcggttgaggaagccgaagttgttgcggatgttattggagaacttggtcagcagcttggtgctcaccacgtcgaactgatgttcggaggttgccaggtcggcgcgctccaggaccacggcggtggccgcatccccaaagatgaagtggctgtcgcggtcgcggaagttcaggtggccggtgcagacttccgggttgaccatcaggatcgcccgcgcctggcctagctggatgctgttggcggcgttctggatgccgaaggtggccgaggaacaggccacgttcatgtcaaaaccaaacccttcgatgcccaaggcttcctggacttcgatggcgatggccgggtaggcacgctgcaggttggaacaggcgacgatcacgccgtcgatgtcggcagcggttttgcccgcgcgctgtagagcttgttcagcggcgccgacggccatctggcagaggaccgaccattcgtcgttgctgcgctcgggcaggcgtggggccatgcgctgcggatcgagaatgccgtccttgtccatcacgaagcggctcttgatgccggaggccttttcgatgaaggcggcgctggattcggtcagcggctgcacgtcaccgcgctcgatggcggcggcgttgtcgctgttgaactgttgcacgtaagcattgaaagactgcaccagctcttcgttggaaatgctgttggccggggtatacaggccagtgccgctgatgacgacgttatgcacggtcgttcctctaaatctgtcaggcagaagatattggtaccgtcgtaccaaactgtaagtagtccgattccgctccgcggacaccaaactggcatcgctttattccatcgcgccgcagcctttcacgacgatcccggcatttataaccgcgaagtttgccacaaccctcggaatttggcgctatctgtgggagggggcttgcccccgatagcggtgggccagtcaacacatcctttactgacagaccgcaattgggggcaagccccctcccacactggacctgtattgccctggaaaccgtgtagatatcaggcttctaccaggctccactgcttgctcaaacgcttgtcggaaatcggcaccttggtgcccaactgctgggcaaacaacgacacccggtattcctccagccaccagcgatacagctccaactgggggtcgcgcttgccttcctgggcgtgttttttcagacggttttcgtactgcgtccacaggccggccagctcgccgctccacacccgatccttttgcacttggctcggcagtttttccaggcgcaactcgatggccttgaggtaacgcggcaactccttaaaccactgcgccggggtttcccgcacaaaaccggggtacaccaggttgctcagttgctgcttgatgtcgttcaaggccacggcctgggccaggtcgatcttgcctttgaagcgtttttgcaggccatgccagagtttcagcacctccagggtcaggcgcgccaggcgctcggcgtgttcggtccaactgctgcgtttgcgctcggccagggcagccaaaccggcgccatcacgcggcaggttggcttcgccttcgagcacgcaggtgtcgaggcttgcgagcaggatgtcttccaccagcgcatcgatgcggcccaactcgcggtacatcaggcccagttcggtcaggcctggcagtttgccgcgcaggaatttcgccggttccgccagttgctgcatcagcaggcgttgcaaggcgcggcgatgctggaactcagcctcggcagccgtggagaaacgcccctccttgaccgtgccgttgtcttccaccagtgccggatataccgtcatcgacagcccggcgatcttttgttgcgtcttctcggccaccgccgcgaataccttggcctccaccggctgctggctttttgcggtttgcggcacagccaatgcggcctggctggcctcggcaaaacgcgccgtcagttcggcgagatcccggccttcaccaaggaacttgccctggccgtcgaccacttccaggttcatcttcaggtggctttccacctgctgcgcggcctcagcccaggcttcatcgctgacccgcgccccggtcatgcgcaacaattcgcggcccagggcctggggcaatgacccctggccgaactcgatgcgttgcagggcagccttgacgaagtccggcaccggtacaaaattcttgcgcagcgccttgggcaggttgcgcaccagggcgatgcacttggcttcgatcacccccggcaccaaccactccaggcgctccgccggcaaggcgggcaacagcggcgccggcacacgcagggtcacaccgtcacgcgggtggttgggttcgaagtggtaactcaaggccagttccaggtcacccaggtggagggtgtccgggtaatgcgcagcggtgacttcgctggcctcgcgggccagcacgtcttcttcgcgcatgatcaacagttgcgggtctttctggctgttgaccttgtaccagctgtcgaaggtcgcggtctggtggatctccgccggcaggcgcgcatcgtagaaggcgaacagggtttcctcgtccgccaggatgtcgcgccggcgcgccttggcttccaactcgtcgagctgttccagcagttgctggttggcggtgaggcacttggcccgcgactggatctcgccgcgtaccaggccttcacggataaacagctcgcgggacaccaccggatcgaccggcccgtagtgcaccggccggcgcccgaccacaatcagcccgaacagggtgatctgctcaaaggccacgacctggccgcgcttcttctcccaatggggctcgaagtggtttttcttgatcaggtgcccggccagcggttcgatccagtcggcgtcgatcttggcgaccatgcgcgcatacagcttggtggtttccaccagttcagcggtcatcagccattgcgggcgtttcttgccgatgcccgacgaggggtgaatccagaaacgccgctgacgtgcgcccaggtaatcgccgtcctcggttttctgaccgatctggctgagcaaaccggacagcaccgccttgtgcagtttcgggaagtccgccggctctttattgacgctcaactgcatgtcgcggcagatcaggctcaactggcgatgggaatcacgccattcgcgcaggcgcaggtagttgaggaagttcttgcggcaccagttacgcagtgggctggcagtcagttcctgacgttgctcttcaaaaccgcgccacaaattgaccaggccggcgaagtccgaatccgggtccttccactgtgcgtgggcctggtcggcggcctgctgacgctccggtgggcgctcgcgcgggtcctggatcgacatggcgctggcgacgatcagcacttcctgcaagctgcccagcttggcggcttcgagcaacatgcggcccatgcgcgggtccaccggcaggcgcgccagctggcggcccagcggggtgagctggctgttgcggtcgaccgccgacagctcttgcagcaggttgaaaccatcgctgatggctttgccgtccggcggttcgataaacgggaaatcggtgatttcgccgagacgcaaatgcagcatctgcaggatcacagcggcgaggttggtgcgcagaatttccgggtcggtaaattccgggcgtccgataaaatcttcttcgctgtacaaacgaatgcagatgcccggctcgacccgaccgcaacggcctttacgctggttggcgctggcctgggaaatcgcctcgatcggcaggcgctgcaccttggcgcggtagctgtagcggctgatgcgcgcagtgccgctgtcgatcacataacgaatgcccggcacggtcagcgaggtttccgcgacgttggtcgccagcaccacgcgccggcccggatgggactggaagatgcgctgctgttcggccggcgacaggcgcgcgtacaacggcaggatctcggtgtgcttgagctgggccttgcgcaacatgtcggcagcgtcacgaatctcgcgctcccccggcaggaacaccagcacgtcgccggggctgcgccgctcgctgcgctcataggcggcgatttcatcgagggcggcgaggatcgcctggtcgacggtgaggtcgtcctcgacgcggttgccttcctcgtcctgctccagggtcagcgggcggtaccaggtgtctaccgggaaggtacggcccgagacctcgactatcggcgcatcgtcgaaatgcttggagaagcgctccaagtcgatggtcgccgaggtgatgatgaccttgaggtccgggcgacgtggcagcagggttttcaggtagcccagcaggaagtcgatgttcaggctgcgttcgtgggcctcgtcgacgatgatggtgtcgtagcgctccaggtagcgatcgttctgggtttccgccagcaggatgccgtcggtcatcagcttgatcagggtgttggaatcgctctggtcttcaaagcgcacctgatagccgaccagcgcgcccaatggcgtggccaactcttcggcgacccggctggccacgctgcgtgcggcgatccggcggggctgggtatgaccaatcagaccgaactggccgcgaccgatttccaggcagatcttcggcaactgggtggtcttgcccgagccggtttcgccggcaatgatcagcacctgatgcttgttcagcgcctctttgatttcatcgcgcttggccgcgatcggcaggctgtcgtcataacgaatcaccggcaggctggcgcgccgcgccgtgacctgggcgcaggacgcctgcatgcgcgcgacccactgcgccagcttctcctcgtcgggcttcttgcgcagctcaagcagctggcgccgcaagcggtggcggtcggcgagcatggcgtgatcgagggttttgagcagttggtcgatagtgggcgcttggtcagtcatcaggtacgcaagggtcgtctatttatgcagggggcggattgtcgcagaaaaccgcccccaagcgtgccccctcattcgttatcgcggtccttacgccggtacgggaatacatcgatcaccttgcccgcccggatcgcctcctgcagccccttccaataatcggcgttgtacaactcgccgtgcagctcgtcgaagagcttgcgctggccggcatcggcgaacaggaacggtgggaattcttcggggaagacgtccaacgggccgatggaataccagggctcggaggccatttcatcctccggggtacgcggcgccgggatgtgccggaagttggcctcggtgagaaaacagatttcatcgtagtcgtagaacaccacgcggccatggcgggtgacgccgaagttcttcagcagcatatcgccgggaaaaatgttcgccgccgccagttgcttgatcgccaagccatagtcttccagggcctcgcgcacctgggcggggttggcgttgtcgaggtagaggttgagcggggtcatgcgccgttcggtccagcagtggcggatcagtacggtatcgccttcgacttcgacggtgcccgcagccacttccaatagctcggccaggcactcaggttcgaatttgctcagggggaaacggaagtcggcgaactcttgggtatcggccatgcgcccgacccggtcgacgcttttgaccaggcggtacttctcgatcaccgtggcgcggttgatgtttttcgacggtgaaaaacggtccttgatgatcttgaacacggtgttgaagcccggcagcgtgaacacgctcatgaccatgccgcgcacgccgggggccatgatgaattgatcgtcggtggtcgccaggtggttgatcagggcgcgatagaactccgacttgccgtgcttgtagaaaccgatggaggtgtacaactcggcgatgtgcttgccgggcaggatgcgtttgagaaagccgatgaattccgccggcaccggtacatcgaccatgaagtaggagcgggtgaacgagaagatgatcgatacatcggcttcgtcggtgatcagcgcatcgatctggataccttgcccttcgcggtgcagcaacgggatcaccagcggccattgttcgtcgcgggtgtagatgcgcccgacgaggtaggcacctttattacggtagagcaccgaggaaaacagctcgaccttgaggtccgggtccttgcacacccagtccggcaggttttcccgcagttgggtttcgaggcgttgaaggtcgcctgcgaggtcggcgtagggttcgctgaagcggtagtcggcaaagatctgcgcgagcatttccgggattttcgcggcgggggtgtaggtgcgcgtctgcgcggcccgtgcccgacgcaggctaggccgggtggtgtggatgaacatacagccgtcgctgatcaggtcgtggctgaacagcccgcagaagatcgagttgtaccaggtctcggagagttcatcgtcaaagcgccggtcgatcaggccgatgtaggcacttttgaccaagggccacgcatcgatgtcgagcagggcggcgtcatcgaagcgctcacgcaaccgctgggtcacctcagtgaccttttcctcatagagattgatccgcgccgccgacgccgcctggccctgctgccactgggccttttcgaaacgctcgcgggcgccatcggtgatctggcggaagtgttcgcggtaatcgtcgaagccatcaaggatcatctgggcaatggcgagggcggattgcgacatgcgggaaacctcgagcgggcatcgggaagccctgagcttagccagtgtacgaacacaggagaagggtcatttttcgtgcagccttgtacaactccgttcatttcgtacatttattttcaatttatttaattcgaccaattggtcaataaacgcactgaaaagtcgcacattgttttccccatacgcccacaacgacgcggctttgctgcttagcgccggaaacacgtgtactcccccggggactctgctccgcatacatctttggatccaactaagggaaaccctgattaccaccttgatggcactttgatatatagcgcgccctctcccaccctaacaaggtccgaagaccgatccgggaacaggttctaatcgcccaaggagcatagagatgtcattgaggaacatgaggatcggtctgcgtgccagtctgagttttggggttttggccagcttgctggtgattgtgggcctgttcggcctgggccagatggccaagctgcgacagagcgcgctggtcatcgaacaatcgtggatgccgagcatcgagaacatccacgacagcgcggcctttgtcgccagcatccgcctggaggccttgcgcctggcgaccaccgacgaatcgcggatccgcgacaacagcaaagccctgatcactcgccagcgcagcgagctgcaaaccctgctcgaccatcacaaaagcctgctcagcagcgacgaagaacgccagatgctcaagcaactcgaagggaacgtgaacacttacctggccctcgtcgaacagatcgtcaccctggtggacaaggatcagcagcaagacgccattgacctgctcaacagccggctcgctccgcagggtgtgatcctcaacaagagcctggaggacatgatcgtgttcaaccagaacggcgtggaaacggcggtggattcagccgcacagacctattccagtgcacagtggatcgtcggcctgatcatcgtattcgccttgatcgccaccttgttgctcgcctggctgctgacccgcagcatcaccgccccgctcggccaggcgctgagcgtggcccgcaccattgccggcggcgacctgagccagccgattgccgtcagcggcaaggacgaaccggcccaattgctcaacgccctggcgaccatgcaggcgcagttgcagggcaccattcgcggcatcagcgaatcggcgcaacagctggcctccgccgccgaagagatgagctcagtgatggagcaaagcacccgtggcctgcaggcgcagaacgacgaaatcgaacaggccgccaccgcagtcaccgaaatgagcgcggccgtggacgaagtggcgggcaatgcggtgtccagcgccgaggcgtcccaggcctccgacgaggacagcaagcacggccactaccagatcagcgaaaccatcagctcgatccagaacctggtcgacgaagtgcttggcgcctcgaacaaggccgaaggcctggcagtgcaggcccaggacatcagcaaggtgctggaagtgatccgcggcatcgccgggcagaccaacctgctggcgctcaacgccgccatcgaagcggcccgcgcaggcgaggccgggcgggggtttgcggtggtggccgatgaagtgcgctccctggcgcaacgcacccaggactccaccgaagaaatcgagcagatgatcaccggcatccagcgcggcacccaggatacggtcgacgcgctgaacagcagcgccgagcacgcgggccagaccctgcagcgggccaacagcgccggcagtgccctggaaaaaatcaccgcggccatctcgcagatcagccagcgcaacctggtgatcgccagcgccgccgagcagcaggcgctggtggcacgcgacgtggaccgcagcctggtgaacatccgcgacctgtccacccagaccgccgccggtgccacccagacctcggccgccagccaggaactgtcgcgcctggcggtggacctgaatgcgctggtgacgcggtttgtcctgtaatcattagacatgtcatgcaacactcgcggccttattgaggtaggagtgttccgtgagacctgtcgacaccttgtacttgctgggactcgccgccatctggggcgcgagcttcctgttcatgcgcattatcgcgccggagatcggcacgctgccgaccgcatttttccgcgtgtcgatcgccgccgccgggttgctggtgatcctggcggtgatgcgggtgagctgggacttccaaggcaagttcaagactgtattgctgctcggcgtgatcaactccgggatcccggcgaccatgtattcagtcgccgcccaggtgctgccggcgggttactcggcgatcttcaacgccaccacgccgttgatgggtgtgctgatcggcgggctgtttttcagcgaacgtctgaccccgtcgaaagtcgccggggtgtgcctgggcctgctgggcgtgggggtactgacccgcgccgggccggtggcgtttgacctgcaattgctgatgggcgcgctggcgtgtttgctggcgaccacctgttacggctttgccgggttcctggcaaggcgctggctggatcagcgtggtggcttggacagccgcctgtcggccctgggcagcatgctcggcgcgacgttgttcctgttgccgttctttgcctacagcgccatcagccaaccgccggcgagttggggtggatggcaggtgtgggggtcgttgctggggttggggctggtgtgtacggcgtttgcctacattctttacttccggttgctgacgtccatcgggccggttaagtcgatgacggtgacgttcatgattccgccgtttggggtgttgtggggggcgttgttgctgggggagccgttgtcgatggcgcacctgtatggcggggtgttgattgcgggggcgttgtggttggtgttgcggccgcgaaaattgtaggagcccggcttgccggctcctacagtgcggtgtcaacgcttacggaagacaaacaccaaaccgatgatgatcaaccccatccccaacaggctcaacatcgcgagcttgttgccgaagatcagatagtccatcaccgccgtcaccgccggcaccagatagaacagactggtgacattcaccaggttgccccgggcgatcaggcggtacagcaacagcgtggccagcaacgacaccaccaagcccatccacagtaccggcaggtagaagctgccgctgtgttcaaaatgaaacggctggaacggcacaaacaccgaacacagcagcaaccccgccaggtattggaccggcaacgtgcccaaggggttgtcggtgatgcgtttctgcatgatcgagccgaaggtcatgctggccagggccaacaacccaaacagcatccccgccaaagacatgccggacaaaccgatgccctggtagaccaccatgatcagccccgccaaccccagcgccaggccaaacaaccgactcaacgaacgctgacgttccatcaacaccacggtaaggatcggctgcacgcccatgatggtcgccatcatgccgggggtgactttcaggtccagggccagcagatagaaaatctggtatgcccccagcagtaccaacccggttgccgccgcgtacagcatgggcttgccggggcgcggcagtttcaacttgaggatcggtatcagcaccaccaggcccacgagggcgatggcaaaacggattaacagaaacgcaaagggtgacgcgtgggccagcccccatttggagaagatcgccccgctgctccacagcaatacaaacaggctcgtcgaggccgccgcggccacggattgtttcgaaagaacagacatggttaccacctgtcatcaggcaaaaaaagccgattcagcagacgctgaaatgcattaggtttttttcaggcgggcagacgggaacagcaatcagctgatcagcccaaaatgccaacacccggcggtgatacgactgcgtacaccggcgtgctactgacaggtggggggtagtgactgatctgcgcaggctgcttgttcgcgcacggcacgaccacagcgttgaccgctgaatcgactaccgctgtgcgctggagagctggcatgggctgatcttgtgtgaagggatgaagaagctcggactataaccacccggtgatacgttttgcaatcggcatgaatggaggagttttcatgtggggcctgcaggaccggtcgctataatgccgcccagcattttccaaggagttcccatgttcgcattgccctggctgtacctggcgcttctttccatcggctatctgctggcgttgatatacgggcaactgggggtgttggcagccgtgtccgtcgccctgctgctgatcgctggctacgcggtacgccagcaacgcacgcactgggcgcgttacctgggccacgggctgttcatcgtgttggcgctgagcctggcgatgcactggttgccgggcttctacaacgggaggggcattgcctcgcaccgcttcaccgaggatgccgtgcccttctcgatgtatttgaaccaggacaaacctctgatcggcttctggctgttgctggcctgcccatggattgtggcacggcgctcgttgcgcttgtcgatctgcgtggccgccctggcattgaccctcaccgccatctccgccctcggcggagcggccttgctgggcgtgatcagttgggcaccgaagtggccggaacaagcctggctgtgggtactcaataacctgttgctggtgacgctggtggaagaagccttgttccgcggttatgtgcagggcggcttgagccgacgtttcaaacacctgccttacggcgagaacctggcgctgctgctggcctcgctgctgttcggcctggtgcacatcggcgcaggctggcattgggtattgctggcgagcatcgccggggtgggttacggcctggcctatcgttttggcggcctgggcgcggcggtggccacgcactttggcttgaatctgcttcacttcgggttgtttacctacccgatgctggccggttgatcccctgcaggggaacgtgcgtaccgccgattgttgcaaaaattaagttaaataaaccgccgttcctgccgataccccctgaaagccttgcggattgaacaatcatgcgtaataaccaacccgttacccagcgcgaacgtaccttccccgctcagcaacggttgatctccaccacagatgccaaaggcgtgatcacctactgcaacgacgccttcgtcgaaatcagtgggttctctcgcgacgaactggtgcgtgccccgcacaacctggtgcgtcacccggacgttccggcggcggtgttcgcgcacatgtggtcaacgctcaaacaaggcttgccatggatgggcattgtcaagaatcgctgcaagaccggtgaccattactgggttaacgcctatgtgacgccggttttcgaaggcaaccaggtggtcggctacgaatcggtgcgcatcaagcccaccgccgagcagatccgccgggccgaagcgctctaccaacgcatcaaccagggcaagtcggcgatcccccagcgggacaagtggctaccggtgttgcaggactggctaccgtttatcctggtgagccagttgagtttcatgatcggcgcgtccctcaactcccactggggctttgccctggcggcggggttgtcggtgccgttgggcctgctcggcctgagctggcaacagcgcggcctcaagcgtttgctgcgcctggccgagcagaccacctccgacccgctgatcgcgcagatgtacaccgacagccgtggcgcccaggcgcgtctggagatgtctatcctcagtcaggaggcacgtctgaagacgtgtcttacccgcctgcaggacactgccgagcacctcaacgaccaggccgcgcagtccaacaccctggcgcataacagctccagcggcctggaacgccagcgcgtcgagactgagcaggtggcgaccgccgttaaccagatggcggccaccacccaggaagtcgccagccatgtgcagcgcacagcggacgcaacccaggaagccaaccgcctcaccggccgtggccgcgacatcgccggggaaacccgcgaggcgattcagcgtctgtccgtagcagtgggtgagaccggtgtgaccgttacccagttggccaaggacagcgatgaaatcggcggcgtggtcgacgtgatcaagggcattgccgaccagaccaacctgctggcgctcaacgccgccattgaagcggcgcgtgccggtgaaatgggccggggttttgcggtggttgccgacgaagtccgccaattggctcagcgcacagccgagtcgaccgggcagatccatgccctgatcgccaagctgcaacaaaccgccgccgctgccgtacagaccatggacgccgggcatcgccaggccgaagaaggcgtggcacgggtgatggaggcggatcaggcgctggtagggatcagtgaggcggtggcgcatatcaccgacatgactacccagatcgcggctgccaccgaagagcaaagctcggtggccgaagagatcagtcgcaacatcagcaccattgcgctgttggcggaccagacctcggagcaagcgtcgaactcggcgcagttgagtgaagaattgacgcatacggcgaatacccagtattcgttggtggagcgcttcaaccgatagaccgttatcggggcggtgcgacgattcgacaacccccctcccacactttgactgtattcacaaatcaaaatgtgggagggggcttgcccccgatagggccctagaggacgccgagaaacctggccaccttcaccgccgccgcctccaaatgctgctcatgactaaaccccgacgccttcaacggcttcaagtcatgatcccccgccaccagccacatcacctcgatgctcggcgacaattcatacccctcaaccgccgcccgattacccagcgcatcgcgctcgccctgcacaatcaaggttggcgtcttcaaccccgccaaatgctcaacccgtggtttctccggcttgcccaccgcgtagaacggataccccaggcacaccagcccatcggcgcccagttgatcggccaacaaactggccatgcgcccgcccatggacttgccaccaatggccagtttcccagcgacatgacgtcgcacctcggcatgcaccccgcgccaggcttccagcagtttcggcgcagggtttggcgggcgcttgccgccatccacccggcgctgggccatgtagggaaactcaaagcgcaacacgttgacgccatgcccggcaaggcctgcagccatatcgttcatgaaggatgagtccatcggtgcgccagcgccgtgggccaggatcagcgtgacgggatcgctcgaaagcgcctccaccgcgacatcccacaaccacccatgttcccgcacacactgcgcccattgatccccgtcaatactggccttgtgctctttgcccatgcttgcctcgctttttagtctgcctataactccagcccaagtgccgcatttgcttgggttgaaccgtggatggggaaccatgaacactactttaagtaccgcctataactacaaggtggtccgccaattcaccattatgacggtggtgtggggcatcgtcggcatggggctcggggtttttctcgcggcccaattggtgtggcctgcactcaacttcgacttgccgtggaccagcttcggccgcctgcgcccgctgcacaccaacgcggtgatcttcgccttcggtggctgcgcgctgttcgccagctccttctactcggtgcagcgtacctgccagacccaattgttcgcgccgaaaatcgccgcgttctgcttctggggctggcagttggtcatcctgctggcagcgatctccttgccgctgggctacaccagctccaaggaatacgccgagctggaatggccgatcgatattctgatcaccattgtctgggtggcctacgccattgtgttctttggcaccgtggccaagcgcaacaccaagcacatctacgtcggtaactggttcttcggtgcgttcatcatcaccgtggccatcctgcatatcgtcaacaacctggaaatcccggtcagcctgaccaagtcctactccctctatggcggtgcgacggatgccatggtgcagtggtggtacgggcacaacgcggtaggctttttcctcaccgccggtttcctcggcatgatgtattacttcgtgcccaagcaggccgagcgtccggtgtattcctatcgcttgtccatcgtgcacttctgggcgctgatcaccctgtacatctgggcaggcccgcaccacttgcactacaccgcactgccggactgggcacagtccctgggcatggtgatgtcgctggtgctgctggcaccgagctggggcggcatgatcaacggcatgatgaccctgtcgggcgcctggcataagttgcgcagcgacccgatcctgcgcttcctggtggtgtccctggcgttctacggcatgtcgaccttcgaaggcccgatgatggcgatcaagaccgtcaacgccctctcccactacaccgactggaccatcggccacgtacacgccggcgcactcggttgggtggcgatgatctccatcggcgcgctgtaccacatgatcccgaaagtctttggccgcgagcagatgtacagcctcggcctgatcaacgcgcacttctggctggccaccatcggcaccgtactctacatcgcttcgatgtgggtcaacggcatcgcccagggcctgatgtggcgtgcggtcaacgaagacggcaccttgacctactccttcgtcgaaaccctggtggccagccaccctggcttcatcgtgcggctggtgggcggtgcgatcttcctcagcggcatgttcctgatggcttacaacacctggcgcaccgtgcgttcggcgcagcctgtcgaagccgccaccactgcgcagttggcctgaggagtctgtgatgaaacacgaaacgattgaaaagaacgtcggcctgctgatgctgctcatggtgctcgccgtgagcatcggcggcctgacccagatcgtcccgctgttcttccaggacgtgaccaacaagccggtggagggcatgaaaccctacaccgcgctgcaactggaaggccgcgacatctacatccgcgaaggctgcgtacagtgccactcgcagatgatccgcccgttccgtgccgaaaccgaacgctacggccactactcggtcgccggtgaaagcgtgtgggaccacccgttcctgtggggctccaagcgcaccggtccggacctggcgcgcgtcggcgcacgctactcggacgactggcaccgcgcgcacctgtacaacccgcgcaacgtggtgcccgagtcgaaaatgccggcctatccatggttggtcaccgccgccgtcgacagcagccacaccgagaccaagttgaaagtgatgcgcaccctcggcgtgccgtacaccgacgacgacatcagtggcgccgtggccagcctcaagggcaagaccgagatggacgcgctggtttcgtacctgcaagtgctcggcactgccatcaagagcaagaggtgagccatgggatttgaattcgatgcaggcaccatccgcggcctcggcacgctggtggtcgccatcgcctttatcggcctgtcgctgtgggtgttcaacaaccggcgcaatgcggaattcgagcaggcgcgcctgctgcccttcgccgatgaaccttctccatccgacgctcaagaagagcctgcaataaggagcacccggccatgaccctattctggagtacatggatctgcgtactgaccctcggcagcctgatcggcttgacctggctgctggtcggcacccgcaagggcgagaccaagggcagcgtcgaccagaccatgggccacgccttcgacggtatcgaggaatacgacaacccgctgccccagtggtggttcatgctgttcgccggcaccctggtgtttgcggtcggctacctgatcctctacccgggcctgggcaactggaaaggcgtgttgccgggctatgaagacggctggacccaggccaaggaatgggacaaggaaatggccaaggccgacgccaagttcgggccgatcttcgccaaattctcggccatgcccgtggaagaagtcgccaaagacccgcaagcgctgaaaatgggcggtcgcctgtttgcctccaactgtgcggtgtgccacggctcggacgccaagggcgcgtttggtttcccgaacctggcggacaacatctggcgctggggcggttcggccgaggcgatcaagaccaccatcctcaacggccgccacgcggcgatgccggcctggggtgacatgctcggcgatgaaggtgtgaaaaacgttgccgcctatgtgcgccacgacctggccaagctgcctctgcccgccgacagcagcgccgatgtggctgccggccaagcggccttcaacaccacctgtgtcgcctgccacggtccggaaggccatggcatggaagccatgggcgcgcctgacctgaccaaaccggccggctacatctacggcaccagccttgcgcagttgcaacagaccatccgccacggccgccaaggccagatgccggcgcaggaagtgctgcaaggcaatgacaaggtgcatctgctggcggcctatgtttacagcctgtcccacaacgctgatggcgcaacgccagaaagccaagcgcaataaccgctgatcgccgccccattttggggcggcaaccctggtgctgtacgcgaccaagtgtcacacccttccaaagcacaactttcccctcctcactttcgggtctacgcttgttcccacagcggaccaatcctggcgtacgcgacgacattcgttgcgacccctgaattttcctgtccactcgatcagctttcgatttccgattttgtccttacaccaaacatggaaagggcgcagaatctggcgtggaacgcattgatacaggtcagtcattgcgttgcaatgacccctcgctttctacatacttgcggccgattttacctataaaaaaacctaaaccgtggaaccttagaatgagcacagcaatcagtccgactgcttataactataaggtagtccgccagttcgccatcatgacggtggtctgggggatccttggcatggggctcggggtgttcatcgcctcgcaactggtctggccggaattgaatttcggtttgccatggacgacctttggccgcctgcgcccgctgcacaccaacctggtgatcttcgccttcggcggatgtgcattgtttgccacctcctactatgtcgtgcagcgaacctgccagacgcgactgatctccgacagccttgcggccttcaccttctggggttggcaagcggtcatcgtcggcgccatcgtcaccctgccgctgggctacaccaccaccaaggaatacgccgagctggaatggcccattgccattttgctcgccatcgtgtgggtgacctatgccgtggtgttcttcggcaccatcgtcaagcgcaagaccaagcatatctacgtgggtaactggttctacggcgcgttcatcctggtgacagcgatgctgcacatcgtcaaccacgcctcgttgccggtgagcctgttcaagtcctactcggcctacgccggggccaccgatgcgatgatccagtggtggtacggccacaacgccgtgggtttcttcctgaccaccggtttcctggggatgatgtactacttcgtgccgaaacaggccgaacgtcctatttactcgtatcgcctgtccatcgtgcacttctgggcgctgatcaccctgtacatctgggcaggtccccaccacttgcactacaccgcattgccggactgggcccagtccctgggcatggcgatgtcgatcatcctgctggccccgagctggggcggcatgatcaacggcatgatgaccctgtcgggcgcctggcataaattgcgcaccgacccgatcctgcgcttcctcgtggtgtcgctggcgttctacggcatgtcgaccttcgaagggccgatgatggcgatcaagaccgtcaactcgctgtcccactacaccgactggaccatcggccacgtacacgccggcgccctcggctgggtggcgatgatctccatcggcgcgctgtaccacatgatccccaaactgttcggtcgcccgcaaatgcacagcgtcggcctgatcaatgcgcacttctggctggccaccatcggcaccgtgctctacatcgcctcgatgtgggtcaacggcatcacccagggcctgatgtggcgtgcgatcaacgatgacggcaccctcacctactccttcgtcgaagcactgcaagccagccatccgggttacatcgtgcgcgccctgggcggtgcattctttgcctccggcatgttcctgatggcctacaacgtctggcgcaccgtgcgtgccgccgaccctgtagaagccgaagccgccgccaagatcgccgttgtgggagctcactgatgaagcatgaagtagtcgagaagaatatcggcctgctggccttcttcatggtcatcgccgtgagcatcggcggcctgacccagatcgttccgctgtttttccaggacgtgaccaacaagccggtggaaggcatgaagccgcgcaccgcccttgaactggaaggccgcgacgtctacatcgccaacggttgtgtcggctgccactcgcagatgattcgcccgttccgtgctgaaaccgaacgctacggccactactcggtcgccggcgaaagcgtatgggaccacccgttcctgtggggttccaagcgcaccggcccggacctggcccgtgtcggcgggcgttactccgatgactggcagcgtgcgcacttgtacaacccgcgcaacgtggtgcctgagtcgaaaatgccggcgtacccgttcctcgtggaaaacaagctcgacggcaaggacaccgcgaagaagatggaagtcctgcgcaccctgggcgtgccctataccgacgaagacatcgccggtgcagccgccgccgtgaagggcaagaccgaaatggacgcactggtggcctacctacaaggcctgggcaccatcatcaaaagcaaacggtgatctatggatatcgggatgattcgtggcctgggcaccgttgtggtgatggtggcctttatcggcctggcgttgtgggtgttcagccccaagcgcaagtcggagtttgaagacgcgaccttgctgccctttgcggatgatcccgaagccatcaagcacgtcgagcaagcttctaggagtaacaaagaatgactacgttctggagtctgtacgtcacagtcctcagtctgggtaccatcttcgccctgacctggctgctgctgtcgacccgcaagggccagcgcgccgagcaaaccgacgaaaccgtcggccactcgttcgacggcatcgaggagtacgacaacccgctgcccaagtggtggttcatgctgttcgtcggcaccatcgtcttcgccctcggctacctggcgctgtaccccggcctgggcaactggaagggcctgctgccgggctacaactacctcgacaccgacaagcaaacccccttcgccaacggccagaccggctggaccggcgtgcacgaatgggaaaaggaaatggccaggtcggacgccaagttcgggccgatcttcgccaaattcgcgtcgatgccgattgaagaagtggccaaggacccgcaagccctgaagatgggtggccgcctgttcgcctccaactgctcggtgtgccacggttccgacgccaagggcgcctatggcttccccaacctgaccgacgcagactggcgctggggcggcgagccggccaccatcaaggaaaccatcatgaagggtcgccatgcggtgatgccggcgtggttggatatcctcaaggaacaaggcgtcagcgatgtggccgcgttcgtgctcaccaacctcgacgggcgcaaactgcccgaaggcgtgaaagccgatgtggccaacggcgagaaactcttcgccgccaactgcgtggcctgccacggcccggccggtaaaggcaccgccgccatgggcgcgcccgacctgactcacccgggtgcattcatctacggctcgagcttcgcccagctgcagcagaccatccgttggggccgccagggccagatgcctgcgcaggagcaactgcaaggcaatgacaaggtgcacttgctggcggcgtatgtgtacagcttgtcccatggagataagaaggctgaagagcagtaactcctcgaaagaacaaagccccgtgcagcgtaagctggcggggctttgttctttctggctcccagggttatccaagcaggaacccactaccacttgatacttgcggctcggagcaaccaagtagtaacgtaactacattcagcctgacaaaggggggagcaccccatgaccatcacgactatttccagccgcgaattcaaccaagacacaagtggcgccaaaaaagccgcccgccaggggccggtttttatcaccgatcgcggcaagcccgcccatgtactgctaagcattgaggagtaccagaaactgacagggctcaaggccgacatcgttgatctgctagtgatgccggaagcggccgatatcgacttcgaaaccgagcgagccgtgatcactcatcgacctgtggacctctcttgatgtatctactcgacaccaacgttatttctgaactgcgcaaaccccaggctgatgcaaaagtggtcgcctgggccaaaagtgtcatcgctacacgcatgtttatttccgcgatcacattgaaagaattggagaccggggtgttacgtattgagcgccgagacccggcacaaggaaagctgctaagaacctggctcaagcgccatgtaatgcccgcttttgattccaggatcctgccggtggataccgcggtcgcgctgcgttgtgcccatctgcatgtgcctgaccgggcaaatgaaagcgatgcgctgatcgccgctaccgctctggtccacgggctcaccgtggtcacacgcaatatcaatgacttcaaatccagcggggttccgttgatcaatccatgggacgaatgaccacaatacctaccaaaaccgtccatacttcccaagtcaattgatccagatcacgtacaccatcaattgatttcccccaacgcgaccaaaggtcgcaccctttgcacatcctcgggggcgtatcattaggccactgcaacaccctacatttgaccccggttggcacgtactggccgaggcaaatctccaccgccgtgggatgcaatgatgagcaaccagataccggtacatgacgttaccccgcctgccaaaaccgtcgacctctacgcctcgcgagagaaaatctacacgcgcgccttcaccggcctgttccgcaatctacgcatgctcggcggtgccggcctgttcctgctctacttcggcacggtgtggctgaactggggtggccaccaggccgtgtggtggaacctgcctgagcgtaagttctttatttttggcgcaaccttctggccccaggacttcatcctgctctcgggcatcctgatcgtcgcagcgtttggcctgttctttatcacggtgtacgccggtcgcgtgtggtgcggctacacctgcccgcaaagcgtgtggacgtggatcttcatgtggtgcgaaaaggtcaccgaaggcgaccgcaaccaacgcatcaagctcgacaaggcaccgatgggcgccaacaaattcctgcgcaaattcagcaagcacacgctgtggctgctgatcggatttgtcaccggcatgacctttgtcggctacttctcgccgatccgcgaactggtgttcgacttcttcaccggccaggccgatggctggtcgtatttctgggtcggtttcttcaccctcgccacctacggcaacgccggctggctgcgcgaacaggtgtgcatctacatgtgcccgtatgcgcgcttccagagcgtgatgttcgacaaggacaccctgatcgtttcctacgacccacgccgtggcgagctacgcggcccgcgtaaaaaaggcaccgactacaaggcccagggcctgggcgattgcatcgattgcacgatgtgcgtgcaagtgtgcccgaccggtatcgacatccgcgacggcctgcagatcgagtgcatcggctgcgccgcctgcatcgacgcctgtgacaacatcatggacaaaatggactacccgcgcggcctgatcagctacaccaccgagcacaacctgtcggggcagaaaacccacaagctgcgcccgcgcctgatcggctacgccctggtactgctggcgatgatcagcctgctggtggcggcgttcttcatgcgctcgctggtgggtttcgacgtgagcaaggaccgcgtgctgtaccgcgaaaacgccgaaggccgcatcgagaacgtctacagcctgaagatcatgaacaaggaccagcgcgaccacacctacgtgctcgacgccgccggcctgcccgacctcaagctgcaaggccggcgcgagatcaaggtggcggccggcgatatcgtcagcatgccggtggagctgtcgagtgcgccggaacagttgccgtcgagcaccaacgaggtgaaattcatcctcaccgatgccgatgacgccagcgtccatattgaagccaagagccgattcatcggcccacaagtccgctaacagggaaccgaacaatgtccgtagcaactgccgcaagcccttggtacaagcacctctggccctggatcatcattggcatcctggcctgttcggtgaccttgaccctgtcaatggtgaccatcgcggtgaacaacccggacaacctggtcaacgacaactactacgaggccggcaaaggcatcaaccgctccctcgaccgcgagctgctcgcgcagaccctgcaactgcgcgccaaggtgcacctggatgagctgaccggtgaagtcgaggtcaaccttaccggctacagcaacccgaaaaccctggagctgaacctgatttccccgacccagccggagaaggaccgcaagatcaacctggcccgcagtgacagcgagcccggacgctatatcggccaggtcaccgacaaggtcgaaggccggcgtttcgtcgagttgctcggcgtggaaggcgaccggacctggcgcatgttcgaggaagaacaagtcagccacgacaaggacttgctgctgggtgatgaaccgttgcagggtgccgaagacctgaaaaaataaaaagcctgcgcttcgcgcatcgggggcaagccccctcccacactggattgggtttacacatatctattggtgaaatcagtcaaatgtgggagggggcttgcccccgatgaggccctaccagccaccatagattcccaagccatgaccaccccctgctaccactgcgccctccccgtcccctccggtagccgtttcaccacggtcatcctcggtgagcgccgcgaactctgctgtcccggctgccaggccgtggccgaagccatcgtggccggtggcctggaaagttattaccaacaccgcagcgaagcctcggccaaccccgaggcgttgccggtacaactggtggatgagctggcgctgtatgaccgcgccgacgtgcagaaaccttttgtgcgccacgaaggcgaactcgccgaagtcaccctattgatggaaggcatcagttgcgccgcctgcggctggctgatcgagaaacacctgcgcagcctgcccgccgtggccgaggcgcggttgaacctgtccaaccaccgcctgcacgtgcgttgggccgatgggcaactgccgctgagccaactgctcggtgaactgcgccatatcggctacgccgctcacccctatcaggcggatcgcgccgccgagcaactggccggcgaaaaccgcctggccctgcgccaactgggcgtggccgggctgctgtggttccaggcgatgatggcaaccatggccacctggccggaattcaacatcgacctgagccccgagctgcatgtgatcctgcgctgggtggcgatgtttcttacaacacccatcgtgttctacagctgtacaccgtttttcaagggcgccttgcgcgacttgcgcacgcgccacctgaccatggatgtctcagtatccctggccatcggcggggcttacctggcgggcatctggaccgccatcaccggcacgggcgagttgtacttcgatgcggtgggcatgtttgcgttgttcctgctggccggtcgctacctggagcgccgcgccagggagcgcacggccgccgcgacggcgcaactggtgaacctgctgcccgcctcgtgcctgcgactcaagcccgacggccagagcgagcgcatcctgctccccgaacttaccctgggcgaccgcgtgctggtgcaccccggtgccgtgctgccggcggatggcgtgattctcgatggacaatcgagcattgatgaatccctgctcaccggtgagtacctgccgcaaccgcgccagaccggcgacgcggtcacggcgggtacgctgaatgtcgagggggcattgaccgtcgaagtacgtgccctgggccatgacacgcggctgtccgccatcgtgcgtttgcttgagcgcgcccaggccgataaaccacgcctggcgcaaatcgccgaccgggccgcgcagtggttcctgttgtgctcgctgatcgccgccgcgctgatcggcctgctgtggtgggagctggacgcgtcgcgggcgttctggattgtgctggcaatgctggtggcaacttgcccctgtgcgctgtctctggccactcccaccgccctcaccgccgccaccggtactttgcacaaactcgggttactgctaactcgcggccatgtgctggaagggctgaaccagatcgacacggtgatcttcgacaagaccggcactctcaccgaagggcgcctggcattgagagccatccggcccttggggtcgttgagcaccgacctgtgcctgagcttggccgccgccctggaaaaccgctccgaacacccgattgcacgcgccttcgggcgtgcgccattggccgccgatgaagtcatcagttcgccagggctgggccttgaaggtcgtgtcggcgagcgcgtattgcgcattggccagccgggctttgtctgcgaactcagtggttgcccgattcctgcagcaccggaggtttgcggccaatggctgttgctcggcgaccgcgacggcgccctggcctggttcgtgctcgacgaccgcctgcgcagtgatgcccctgccctgctggccgcgtgcaaggcgcgtggttggcgcacgctgttgctgtccggggacagttcgccgatggtcgccagcgtcgccgccgagctgggtatcgacgaggcccacggcggcctgcgcccggatgacaagctgcaagtccttcagcaactgcacaaggaaggtcgcaaggtgctgatgcttggcgatggcgtcaacgatgtgccggtactcgccgccgcggacatcagcgtggcgatgggcacggccaccgacctggccaagaccagcgccgatgcggtgttgctgtccaaccgcctggacgccttggtgcaagcctttactctggcgcggcgcacccgccgggtaatcattgaaaacctgctgtgggccgggctgtacaatggccttatgctgccgtttgccgccctgggctggatcactcccatctgggcggcgatcggcatgtccctcagctcgttgaccgtggtgctcaatgctctgcgcctgactcgcctgccgagcgcgccggccgtccgagccccctcaataacccgcccgctgccggtgtgagccgcgcgggcatggagtgcagatgccagctttatacgtgatgatcccggcggcgctgctcttggtgggcgtggccatctacatcttcttctgggccgtggacagcggccagtacgacgacctcgacggcccggcccatagcgtgctgttcgacgaccaggacccgaaccacctggccggcgtcgaagaggccaaccaccccgaacaaccaccaaaagacccgccccatgcttgagctggcgccgctgctggtctctgcgctgatcctcggcctgctcggtggcggccattgcctgggcatgtgcggcgggctgatgggcgcgctgaccctggcgatccccaaagagcaacgcggccgcaggtttcaactgctgctggcctacaacctggggcgcatcctcagctatgccgcggccggcgtgttgatcggccttgccggctgggcggtggcgaacagcccggcggcgatgttcatgcgcgtgctcgccggcctattgttgatcagcatgggcctgtacctggcgggctggtggagcggcctcacccgtatagaaagcctcggacgcggcctgtggcgctatatacagccggtcgccaaccgtttgctgcccgtgtccagcgtaccgcgtgcattgctgctgggcgcgctgtggggctggttgccgtgcggattggtctacagcacgttgctgtgggcggcgagccagggcaatgcctgggacagtgggttgttgatgctggcgttcgggctggggacttggccggtgctgttggctacaggtctggcggctgagcgggtaacggcgctgttgcgcaagcgcagcgtgaggatggccggcggcttgctggtgatcctgtttggaatatggacgttacccggtccgcaccagcactggttgatgggccattagatcgccatgtggcatagcgccgctccctgttgatgcaaatcaaggtggtcgccccggccagcccctagactcggcccactagcctatccgggggaacgcccgcatgctcgacgccattcgttgggataccgatctgattcaccgctacgacctggcgggaccgcgctacacgtcctaccccaccgccgtacaattcgacagccaggtcggcaccttcgacctgctccacgccctgcgcgacagccgcaaggcggtgcggccgctgtcgctgtatgtgcatgtgccgttctgcgcgaacatctgctactactgcgcctgcaacaaggtcatcaccaaggaccgtggccgcgcccaggcctacctgcaacgcctggagcaagagattcaactggtggcgtgccaccttgaccccaagcaaccggtggaacagctgcacttcggcggcggcaccccgacctttctcagccacgacgaattgcgccaggtgatgagctgcctgcgccagcacttcaatttgctggatgacgattccggcgactacggcatcgagatcgacccacgcgaagcggattgggccaccatgggcctgctgcgcgagctgggtttcaaccgcgtgagtatcggcctgcaagacctcgaccccgaggtgcaacgggcagtcaaccgcctgcaaagcctggaagaaacccgcgcggtgatcgatgcggcacgcaccctgcaatttcgttcgatcaatgtcgacctgatctacggcctgcccaagcaaacgccgatcaacttcgcacgcaccgtggaagaggtaatcaggctacagcccgaccgcttgtcggtgttcaactacgcccatctgccggaacgcttcatgccccagcggcgcatcaacaccgatgaactgccgtccccggcctcaaagctgctgatgctgcaaaccaccatcgagcaactgacccaggccggctaccgctacatcggcatggaccacttcgccctgcccgacgacgaactggccatcgcccaggaagaaggcaccctgcagcgcaatttccagggctataccacccacggtcattgcgacttgatcgggcttggtgtgtcggcgatcagtcagattggcgacctgtactgccagaacagcagcgacctcaacggctatcagaacacgctggcgggcgcgcaactggccaccagtcgcggcctggtgtgtaccaccgatgatcggttgcggcgggaagtgatccagcagttgatctgcaatttcagcctggacttcgagaagatcgagcaggcgttcaccattgattttcgcggatattttgccgagatctggccgcaactggaggccatggccgaggatggcctgatcaaactcgacgcccaaggcattcgcgttttgccagccgggcgcctgctggtgcgttcggtgtgcatggtgttcgatgcctacctggagcaccagaacaggcagcggttttcgcgggtgatctgaaacaccctacgccatagcgagggagccggccttcaacgcgtcttccccgctgaggcctttcatggccttggccagggaggtttgtgcagtcaccaggctcgcctgcaactgggcgagtgccccttgcagattgctgaccttgatccgcgcctcgtcggggctgaggctcttgtccgccatcacggcttgcagttcggcctgtttctcggcgatctgctccttgatcttgcgaatcatcttgaggacctgctggacactgtccggcagaccgctgtcttcgatgtccttattgggtttcttggcctccgtcagggctttcaaggcagcaccggaaaaggtcaccttcaccccctcctcgtcctttttctcccgcaacggcgcttcagtagcgtccttgagctctttggcagccttggcgagcttggcctctgccaccaggtctttcggctccgcaaaggactgcacctgagcgcctgccgagttcattgcaccgatggaaatcatgaatagagcctccaggctcaagggttcgtgactttgtatcggcggcgacacaaaattctttataccgttgctggttttttgtacacgctggcctcaccggcccccagtgcgttacccttacgtcttatgtgtgttttcccacaaggatttaagaaatgtccgagccagtcaaactgcgcgctcacagccaggctcattgcaaggattgcagcctggcccccctctgcttgccactttcgttgaatctggaagacatggatgcgctggacgagatcgttaaacgtggtcgcccgctgaaaaaaggcgagttcctgttccgccagggcgacaagttcgattccgtttatgcagtacgttcgggtgcattgaagacgttcagcctgagcgacagcggcgaagagcagatcaccggtttccacctgcccagcgaactggtgggcttgtcgggcatggacaccgaaattcacccggtgtcggcccaggcactggagactacatccgtgtgcgaaatccccttcgaacgcctggacgaactggccctgcaattgccgcaactgcgccgccagttgatgcgcgtgatgagtcgcgaaattcgtgacgaccagcaaatgatgctgctgttgtcgaagaaaaccgccgacgaacgcatcgcgactttcctggtcaacctgtcggcgcggttccgtgcccgggggttctcggccaaccagttccgcctgagcatgtcgcgcaacgaaatcggcaactacctgggcctggcggtggaaaccgtgtcccgcgtatttacccgtttccagcagaacgagctgatcgccgccgaaggcaaggaagtgcatatcctcgacccgatccagttgtgcgcgctggccggtggttccctggaaggttgacgcagacacttgcggccgcgccaaccggcgaggccgcaggtatacttcgagtccgtttccagccccaggactcttcgacgatgaccttcgattcgttcgacatcaaatccctgatccgtcccgtcatcgacttccccaagccgggggtgatctttcgtgacatcacgccgctgttccaatcgccccgcgccctgcgcctggtggccgacacctttgcccagcgctacgtcgagaccgatttcacccatatcggcgccatggatgcgcggggtttcctgatcggttcgatcatcgcctaccaactgaacaaaccgctgatcctgttccgcaagcagggcaagctgcccgctgacgtgctggccgagggttaccagaccgagtacggcgaggccttcctggaagtgcacgccgacagcctgtgcgaaggcgactcggtgttgatgttcgatgacctgatcgccactggcggcaccctgatcgcggcggcgaacctggtacgccgcatgggcgcgaagatcttcgaagcggcggcgatcattgatttgccggagctgggtgggtcgcaacgtttggaagatatgggaattccaacgttctgcctgacgcagtttgcgctgactgaacaataacggttgcctgggctgatgccatcgggggcaacccccctcccacacttgaccggttcacagatcaaaatgtgggagggggcttgcccccgatgaggcgctgaaaggcactaaagatcagaagcccatctgcttactgatgatttcattcatcacctcgcgggtaccgccaccgatggagaggatgcggttgtcgcgatacagccgctccaccaggctgccacgcatataaccctggcccccgaggatctgcaccgcgtcgtaggtgacgcggtcggcggtgtcggtggcaaggttcttggccatggatatctccttgatcacgctgataccggcggccatctttgctgcctgccgataagtgaactcccgagagacctccacggcggtggccatttccgccaggcgatgcttgatcacctggaatttgccgatgggtttgccgaaggcttcgcgctcggcggcccatttgaggctttcctccagggccagttgcgcggtcatgttggccatgagcgccagggccaggcgctcgctctggaagttgcccatgatgcaggcaaaacccatgttttcggcgccgatcaggttgcctacgggcacccgacaatcgtcgaagaacaattcagccgtgtccgacgcccaccagcccattttcttcaggggctggccgacggtaaaaccgggggtgtctttttcgatcagcagcaggctgatcccggcaaagcccggcccgccagtgcggacggcgacggtgtagaaatcggcgcggatgccgctggtaatgaaggtcttgctgccgctgacgcgataatggtcaccgtcgcgaatggcgcgggtctgcaggctggccacatcggaaccaccgcccggttctgtgactgccagggcgatgatcttctcgcccgacagcacctgtggcgcgacgcgctcacgcacgtccggccgcgcccatttgacgacgggcggcaagccgatatccagcgagcccagccccgccacgacgccgccagaaccgcagcgcatcaactcttcgctggcggccaccttggcgaacagatcgccttcatggctaccaccgaggacttcgggataaccgatacccaggatccccgccgctcccgccttgaggtacaactcccggggaaagctttcggcttcctcccagtgctcaatccccggcagcatctcgcgctcgacaaagcgacgcacgctgtcgcggaccaattggtggctggggtcgaagtagtcctgataggcagacatcggcaagctccacggtgaggtggagcgaaattaccaagcgcttgcttggttatcaagccgtgccgtcagagggcgatcggtttgcggccggcaaacgaatgcgccagcgtgccaccatcgaccaattccaactcgccacccagcggcacgccatgggcaatgcgcgaggtgatcaggcctttgttggtcagcagttgggcaatgtaatgcgcggttgcctcaccttccaccgtcgggttggtggccaggatcacttcggtgaaagtgccctgctcttcgatgcgcgccaccagttgcggaatgccgatggcttccgggcccaggccgtcaaggggcgacagatggcccttgagcacgaagtagcgcccgcgataaccggtctgctccaccgcgtatacatccataggcccttccaccacgcacagcagcgtgtcgtcgcgacgcgggtcggcgcattgcgggcagagttcttcttcagtgagggtgcggcactggcgacagtggcccacgccggtcatggcctggctcaaggcctgggccaaccgggtgccgccgctgcgatcacgctccagcagttgcagcgccatacgctgggcggttttctggccgacacccggcaatgtgcgcagggcgtcgatcagttggcgaatcagggggctgaagctcatgggcgaagggtccgacaaaacaacgagacgcggtttatacccgcgccccggattagcgtcaaatgcgcaccaccaacttgccaaagttgcggccctcgagcaaaccgataaaggcctcgggagcctgctccagaccgtcgaccacgtcctcgcggaacttgatcttgccgtcgcgcacccacggcgccatggcgctgaggaattcaggctggcggtcaccgtagtcatcgaacacgataaagccctggatgcgcacgcgcttggtcaacaaggtacgttgcagtgtcggcaaacgatcaggcccgctgggcacttcatgggcattgtagccggcgatcagcccgcacaacgggatccgcgccttggggttcaacagcggcaccaccgcgtcgaacaccttgccgccgacgttttcaaaatagatgtcgacgccgttgaagcacgcctgggccaggtcatcggcaaaggtcgcgctcttgtggtcgacgcaggcatcaaagcccagttcgtccactacatagcggcacttttctgtgccccctgcgatcccgaccacacgcaagcccttgagcttggccacctgccccaccaccgagcccactgcgccggatgcggccgccaccaccagggtttccccggccttgggttgaccgatgtccatcaggcccatgtaggcggtcatacccggcatgcccagcacgcccagtgccatcgacgggctgggcaagcccttgggcaccggcatcaggttgcgaccatcggaaatactgtggctctgccaaccggtcgcgcccaccaccaggtcgcccacttcgaatttcggattgcgcgactgctcgatacggctgacagcaccaccggtcatcacttcgtcgatttccaccggcgccgcataggacggagcgtcgctcatgcgcccacgcatgtaggggtcgagggacaggtacagggttttcagcaggacctggccgtctgccagttccggcaggttcacccgctccaggcggaaattttccggggtgggtgcgccctgggggcgtgagaccaggacgatgcgctggttcagggtcggttcttgaggcatgaaggggctcctttatcgattccatcggtatagggtgcagaccatgcgtggcgtgccagggttcatattggacgcgaagcgtcggggggcggcattcccacgcagagcgtgggaacgatcagcccgctcgccacaacacgaacaaaaatgccaggcacaaggcctggcattggagtctagctaaagctcgtcgatcagaacggcagcttcatgcccggaggcagttgcatgcccgcggtgacgccgcccattttttcctggctgttggcttcgatcttgcgcacggcgtcgttgacggccgcggcgaacagcgcctcaagcatttccaggtcatcttcgcccacgcctggcaggacgctcgggtcgatgctcacgcgtttgatgtcgtgacgaccggtcatcaccacgctgaccatatcgccaccggctttaccggtgacttcggcgttggccagttcttcctgcatcttggccattttttcctgcatctgctgcgcctgcttcatcaggccggccatgccacctttcatcatgggaatcacctcaaaagtacgtggatcaataagtagcccggttttatgacgcctggggcaccggggcttcgacaggttcaatagtatcgtgacggacgaccgcaccgaactgttgcatcatttgctggatgagcggatcggcatggatcgaatcctcggcctcacgctggcggttgatgcgccggcgggtcgcggcctgggccggggtttcctgctcgggcttgatcagctcgatggcgatggtcaacgtacgctcatggtactggttcagcgcatcgttgagacgacgctgttgggtcgcgttgaacagggcgctgtgggccgggtccaggtgcaacaaccagtggtcgccttcaatggaaatcagcgtgcagttggcggcgatgctgccggtcatgccggagatcggcagtttcgggaacaactccagccattgcagggccaggccggtggccggcgccgcagcgggctccgcttccggctcgggggccggttcggcggtgtgctcgctggccagatcgtccaggtagctgtaggccgaatccatgtccggctcgatgtagtcttcgtccagcggtggctcgtcgtcgaggtcgatgcccggcgtggcggcttccacctgcgccacggtgggctcggggacgggtgcagagacccattcgggagcatccggcaccacgctgtcgggagtcggcgtgggcatcggcgtcagctcgggttgctcgccggtggtttccagcacgggctccacggcgggcacttgctcggcctcgacttcagcttcgaccggatcattccagggcaggtcgacgacgggctcaggctcgacaacaggttccggctcgaccactggcgcagccgccacaggttcaggcaccggcgcaagagcaggcgcagcaaccactggcgcagcaactgccgcgccagccactggtttggcggaatcaactgtggcctggctgatccccactggctttagcggctgtctcggcgcgtctgccgaatcggcgggccggaaggccagcattcgcagcaacaccatttcaaaaccgccgcgagggtcgggcgccaggggcaggtcgcggcgaccgatcaggcccatctggtagtagaactgcacatcttcggccggcagcgcctgggccagggccagcacgcggtcgcggtcgccatggccgttgtcgacgccttcaggcagcgcctgggcgatggcaacacggtgcagcacgttgagaatttccgagagcacgccgttccagtccgggccttgctccgacagatggcgcacagcttcgagcagcgccttggcgtcgccttcgatcagcgcgtgcagcacgtcgaagacctggccgtggtcgagggtgccgagcatggcgcgcacgtcggcggccatgaccttgccttcaccaaaggcgatggcctggtcggtgaggctcatggcatcgcgcatcgaaccatcggcggcgcggccaagcagccacagcgcgtcgtcttcgaacggtacgttttcgacgcccagcacatgggtcaaatgctcgaccacccgctcgggggtcatgtttttcagggagaactgcaggcaccgcgacagaatcgttgcaggaagtttctgcgggtcggtggtggccaggatgaatttgacgtagggcggcggctcttccagggttttcaacagggcgttgaaggaatggctggacagcatgtgcacttcgtcgatcaggtagaccttgaagcggccacggctgggcgcgtactgcacgttgtcgagcagctcgcgggtgtcttcgaccttggtgcggctcgcggcgtcgatctcgatcaggtcgacgaaacgcccttcgtcgatttccttgcacaccgagcaggtgccgcagggcgtcgaagtgataccggtttcacagttcaggcatttggcgatgatgcgcgcaatggtggtcttgcccaccccgcgggtaccggtgaacaggtaggcgtggtgcagccgttggctgtccaaggcattgatcagagccttgagcacatgggtctggccgaccatttcgcggaacgagcgcggacgccatttacgtgcaagaacctgataactcatcgaaaaccgtcgcaactgggaagcggaagccggtaatgctagcggagcaagggggaaattgcatccggcacgctcgcctaatctgactaagcttgccgggttggccccaaaaaggcctgaacccggagtgtgtatgcgcgtagtcctgggcgctttatggatgatcaccacggcttgcctggcagcgcccgcaccgttgcgtttctcggtttccgacagctgggcgatgcccctggtgcaattggagggcggccggcccacccagggcattttgtatgacctgatgttgagcctggctacccaggtcggcaggccggccgaattccatgtgttggcacgggcgcgtatctccagcgccatggagcatggcgatattgatgtgcgctgttatgtcacccaggcctgggtcgacgacgcgtccggcgattacgtctggagcgtgccgctgatggtgcagcgcaacctgttggtcagcacccacatccccccgaagccggtagagctggacacactcgcgccgcaggcgatcggcaccgtgctcaattaccggtatacgaccctcgacccgctgttcgccaaagaccaactcagccgcgacgatgcgcgtagcgaagagcaggtgctgcacaaactggtggccgggcgcttcaagtttgcggtgagcaacgaatggatactcgaccgtttcaaccaacgcctgccggtcggcaaacggctgcacaaggttgtggtgattgatgagcagcgcctgggctgtatcgtgcgcaacgccccgaatgtgccggtgcagcagatcctgcgcaccttgctgcgcatgcagcagtcgggcgagatcgagcagatcatccggctctacaccggtgagactcctgacagaaactgacagtgccgccttatagacttggcgccatcgaacacgcattcccaaggagcctgcatgaacaccctcgcccattacttcctgctgtacgtcgacagcccggccaccagcgccaacttctatagccgcctgctggacaagccgcccgtggaactcaacccgaccttcgccctgttcattctcgacaatggcgtaaagctggggctgtggtcgcgccataccgtggaaccggcgacccaggtcaccgggggtggcggcgaagtgggcttgtccctggctgacaaagccgctgtggacacactgcataatcaatgggtagcgcgcggcgcaaccatcatccagtcaccgaccaccctggacttcggctacaccttcgtcgcccaggacctcgacggccaccggctgcgcgcgttttgcctgagcgactgaccgccagcgcccctccaggctgatggcggctacactggccaacacgatcacaccgcccagcaccacttgcagggcgatgtgctcaccgagcagcgttgccgccatcgtcatcgccaccggcgggatcaggtacatcgccaccgatgcgcggctgacctcgacatgtttcaacacatagccccaggccaggtacgccagggcgctggggaaaatcccgagcaccagcaccgcgaggttctccggcaacggcgcctgcaccacggcagccgacaggcccggcaggttcacacagagcatcaaggtgccggcccagaccatgtagcaggccatcgtcagcgggctatagcgatgggcgtaatgtttctggatggcgaagtacaggctccatgacaccgccgccagcaggatcagcaagccgcgcgggtcgatatcgcccacgccgtgatcgccccagatcaccaccagcacgccgagcaaacccagcagcacgcagctccagcgccagaggctgacccgttccttcaagcagaagaacgcgatcaacacgctgaacagcggcgccgattgcgccagtacactggacgccgccgccgtcacgaactgctggccgtaattcaggctggtgtggtgcaggaacaccccgaaaaaactcaacaccaacagccacggcagatccctcagacgtggccgaccgatgcccagcatcagcgccacaccggccatgaacagcgaggcgatcagaaaccgcagcagcgcaagctggccagggctgtagctgtgcaggccgatgtgcacgccaatcggcgaataggcccaacagaggatgacgctggcgatgactagcgtaagcttcaggggtgacggggtgttcatcgacggcatccgaaacggggaaggaatgccgtcagtcttcgcccgagcaacgcgcaggacaattaaccgtttctgacttctgaaatcactggaactgagcaatggaactggcccaattgaaaatggtgcgagccgtggcgcaaaccggcagcgtggcccaggccgccgtgcaattgcattgcgtgccgtccaacatcaccacgcgcatcaagcagctggaaagcgagttgggcacaccgctgtttatccgtgccggacgcgggctggcgatcagtgcggccggtgagatcttcctggagtattgcgaacgtatcctggcgctggtggacgagtccaaacgcgcggtcgacgccaacgcgattccccgtggcaccctgcgtatcggcgctgtggagtccagcgccagcggacgcctgccgccgttgctggccgaataccatcggcgctacccggatgtcagcctggagctggtgaccggtgcctggggcgaactgctcgatgacctgcaacaccaccgcctggacgtggcgctggtggccgccggcaacaaacgcgcaaagctcgaacacagcgtggtctacagcgaacgcctggtgctgatcgccagcgcctccagcgcaccgatccgcagcgccgaagacctggccggtcgcacgctgctggtatggccgcccggctgcccttatcgggcggcgctggagaactgggtcaagccccacgcgttcaagccggccattgccagctatgccagctggggcacgatcatcggttgtgtcagtgcgggaattggcgtggcactggcgccggaaggcatcctggcccgctatgagcaggccaatcagctggcgtcgtaccggttcgaggaactgcaggcggtggacaacctgctgttctggcacaaggacacccagcggcacctggcgcgggatgcgtttgccgggttgttgcgcgaaactttcggctgatcagcttttgggggcagccagatggctgtactgatcctggctgatccacccggtaaacgagcggtcatcggcattgatgaactcgacctgggcccagccatccttgaaggccagcactccaaccacatcattcttgacgatgtacggacgcttggcggccttggcacttgggtttttcagcaggtaagccttgtcggcggacaccttcaccaggccgatccatttcgtgttggcggtctggctcaggtccaggccggtggcgatctccggcatcagcacattgaggcaacccggatgctggcggccttctgccacggtcagggtcacaccatcggacgagggtgccaggctgccggggtaggtggcgtcggcccaggtagtcagcgcagcgggtttgccttgcaggtagaacgtgcaactgcgggtgacgccctcgcccatcgcttccgagtagtaaccctccacctggtgctcaggcgtcaccgccagcatcagcccttcatacttgcccgaatgcaacgcgggcgaaccggcaaacgcaggggctacagcgcacaacgacaacacaccgatcgctagaaaacggatcatcttattttttcccttcaagtttctcgtaggctttttgcataaggacgtcatagttgccgtagtcctcgccgttatagttacgcgccatgccggtaaaatccttggctttcatggccttcatcaacgccgggctcttgctgcaaaaaccgaggaaggcctttagttggttaccggcattcacttttaatgccgcagaaaattcaaacaccgtcttgtaaccgcaggacgcgtagttgaaacccatgatctgaaacatgccccaggacgccgacatcaacgcggcttcctgatccagcgcaaacgcggtggccatggtttcccaggccttggtctggtccttgttattggtctgccactgtggcccggcctttttcttgtaggggtaggacagtagcgggtgcgcctggtcgtagatgtgcttggtgcacttgcgaaacaggtgcccttcgaaggcgattaccggcaatttggccgggccaaaacctgaacggccgccggattccacggtggcgaaggccttgatgatgttcaccgaaataccaccgcccaactgcgtggccgcgttctggaaatccgtctcgctgagggtcatgcccccgtcgcacgtggcctgcagcatcaattgacggttgcgcttctcggcctcgatcatcgcgcgcatgcggtccaggtacacattgaccgtggcctgcaccgcgtcaccctgattgttgccgaacacattcagaaagctcgggatacgcatgctcgggaacgcctttaccggcaccttcaccgcttcttcgatcaggctgttgaaggttttaccggtcgggtcgatcacgctatcagggtgggcatatttgagatgacggaattgatactggctgatgcattgcaccaattggccatcgcacttgccgttttcggccagcgggaagcccatttttggaatgatcagattgaacaagtattggacgcactgcacatcggcgggcaagttgcgggctttgccgggcgcgcctaccgaagcactgataagacggggcaacccttgcaggcttttcatcacagacatccttgttagttaaaaaagcgatggcacttcaatatcaacttcacacacttgtcacactctgaaacaagtggctggcggaaactaacaaggtggttttgggttgtaaagcatgcaattttaaagttgtgaaatagctatcggataacgtccagcacctggcatttctggtgagtcgcgtcagactctcgtaacgaaatggggtggagggacgcctgcccggtcaggtttgcttagcgtttccatgatttccctttaatatgcgatacccgcccaccaagcagagggatgcgctcaaatgcccggccagataatcgaatcggagaaacgactgtgaggctcgacaaactgcgcgtgcagaattaccgctgttttggagagtttgagatcgacttcgatcctcatctgaccgtcttgattgcatccaatgggggcggtaaaaccaccattctagatgctgcacgggttgccctatggccttttgtaaaaggcttcgacctcggaagccagaccggaaaatccgcgacaatacaaatcgacgatgtacgtctagccaatctctccagtggcaacatggagcctcaaatcgccagcattatcgaagccaggggcgtatgggcgccagacgaggttgaaagccattggttacagcagcgcacgagcttgaaaaaatcgaccaatacccttggtgatttgggttcgaaagctctgacgggatacagcaagtctcttcaggaaaaagtacgcagtgatgagaccgtcgtcttaccgttggtgagctacctcgggacgtcccggctttggtacgaaggccgctttacttcggcggcagcccaaaccacgctcgacaagtctgaatactccagaacatcggggtatctgaactgcctctcctactcgtcaagtttcaaaacgtttaccgcatggtacggctgggtctatcgcagctatcgggaagcgcaggtgattgctctggaacgcaatgcacagctaaccgatcttggtgttcggttcgcgcagatcatcaagtctgtcaaagcggcaattgatcaattgttacaggctccgacaggctggcacagcctggagtacagtgagagccatcaacagcaactgatcatgcaccatcccgaacagggcatattgcctgtagaaatgctcagcgacgggctgcgcaataccattgccatggttgctgatttagcgtttcgtgcctgcaagctcaacccacacttaggcgaaaaggctccgttacaaactcccggtatcgcactgatcgacgaggtggatatgtttctccaccctcactggcaacaagtaatactcggatccttgcgatcagcttttccagcgatgcaattcattgttactacgcatagcccacaagtattgagtaccgtacgacgcgaaaacattcgagtcattggcaaggacacgcacggcaacctggttgcctcacccccattggcaatgacctatggcgagcccagcaatagcgttttacacagcgtgatgcaggtagatccgcagcctccagtacttgaaaaaccagatttgttgctgctcaccgaatgggtggacaagggccgatacgacgagcaacctgccgttgaattaatggagcgacttacacgcgtattaagcgatcagcaccctcaacttcagcgcctgcagcgcagcatcaaacggcagagagcacttagaaaatgagggctattcaaaagcggggccttggtcctcatcaattgaataactcacatgcaaatccacccattacagccaaggcggctaccagtcgatggtcagggtttggctacaaacaacaggttttgacctatctgctggaagagcagtatgggctgtgctgctacagtgagatcagacctgatcaggtcggtctaggcctacacatagagcacgtcgaaaataaaagccagaatccacaacgtacctttgattacaacaatctggctgcttcagcattggatagccaaaccgatctgcacaccttcaaggggctcgcgtcagcagtgttcggcggtcacgccctgggaaagtcggacgcggtagatgtccatcgttttgtatcctgccaccagcctgattgcagccgcttttttgcgtacctttctgatggtcgcattgtgccggctgacgggttatccctggaagatgaagaccgagcgtcatacaccatcgccttgctcaacctgaatagcccatttcttcaagacttgcgccaacaatggtgggacgaactggaagcgcttttcgatgaccacatcgaacaggatatgagccttcattgccttgcaggtattgatctcattcctcgagaaaagcgactaagtccgttcttcagcatcacccgaaatttttttggccaaattgctgaagaagtgctggatcaagatgcacctaatctgaagtagttgagacctatgacttgatcagtaaccgtggaactccctggttttctgataggtgtggaaatcaatccactcgactacatcgtaaggcaggtaaagctgcatccgcgcgcgggaaatggcgatatacacctcgcacagccgttggtcgaacgcgtaggcgtccttgaacttcacgttggtcagcaactcgggcgtcagcaatacccggtcaaactccatgccgcccgcctctgccgccagcattagcaggcaacgcttgccgggcacgccgcccagtcggttcaagcgtgtgatgtcggcgacgttgaagcctttttccaactcgctctcgacccacagaaacgcttcatcgaactggctggcatcgcgcacctgttgccaatcgtccatgtcgctgaaatacgcatggggaccgttgtcgttgtgctcgttgctgtagaactgcggcttgaacaaggcgatgacgctgatcatgaagcgctgcagatcctgctgcgctgcagtgtcgaagaacccgaacgggcagttggcctgctgcaactggatggcccatttcatggtgtcccaatgggaggcggtcaacaccacgcagccttccggcggtacgaagccctgggggtaatgttcgatgccgacgtccgcgtcccgtgcgccttcgaagggggtcttgcacttttgtgagtgcacgctgatcaacgggttgaccaggcgctcgacgttgcggcccgagcgcaccgagtaactgatgtcggtgtgccggacttcgcgctttcttcgcaccatcacaccgctggccaattggtattcatcgccgagggtgatcaatacctggcggccacgctcgataatctgcaacaacgaaggcgggatgtcctggctttcatcgatcaacacgtgggtatagcgaggcggcaccacacagccttcgagactcgcacgcttgatcagccacaatgccgcgaaggcagtctggccggcccactgtgggttggcctccaggtacgtccacaaccggctggaatactccagcaacgcctgggtatccacgctggacaacgggtgcttgaaatgcggcaggtgcctggccgacaggctgtgatgactggagtggcaatagctttcgagcaccttcagacagatatccagcgtcgccacgccctcgtgcccccgccagccgtggatattcagggtctgcgacacttcatgcttgccgggcaacctggcaggcgtgccctgcacggatgggcgcggcccctgcagcagcgccttggcgaacgcggcgaaggtcgaacccgccttgctgtccttccccaaccccatgcgctcacgcagggtcgccagtttggcccctgtgcgtgccagcaccagggtctgggcggggcgcaggcactccatcaaggcgccgagcaggtggctcttgccgatgcccgcgtagccctggacatgcaggtcttcattgaggttggcgcggaaggtacgcaccagtttgtcctgggccgggctgagccagcgctcacgctggcggggcgtgatcatctgttggctgaatggatcattgctgcgcaggtggcggaccttatagccgatatcccatttgcccgtaggcagcaggtaatcccgcgccgcgacttcttcagccgacagcaggcgcaggttgacgcttttaagcgcgttgaaaccgaagtagagcttgcgcggatcgaacagtcgctgggcttcggacagcagcgtcgcagcgccccctgcccgcgtgtcgaccgaccagtcgagcaacttggccaggatgcgttcggcgcccgcgcaggtcaggtctttttccgcggcctgggccaggttctggatgaccagtacggcggccagttccgggtccgtcaggccagccagggccagggcgccgtccgtaccgagcagggccgtgcaggtttcatccgtgacaggcaggaagaccgggctggataaatcgaagtgttcaggttgcatagtgcctcgccgccagggaatcaggcattgccctgaccgcccagttcaaaccgatactcgcccagggagcccgacataccgccgcaatgagggcctgcgtcagccgcagacgccatcgcattgatctgttgctggagttcgaacacagccatatcgagcaaccgccgcaagtcttcggcgctctgcgcggccacgttcaattgcagcgtgcaggcgcccgccagcggtggctgcgcgggctcgtcaacgacttccgcagagcggatcatttccgcctggctgaggatttccgcgtgttcatcgtccatcaggtccagcaccctcgacaattccagggtctgctcagggtgggattgaatgcggtccttgatctccaggcggcgcatctgccattcccgcagtttttcgcgagtgaggtcgtcgactttttccacgtgtgctgtctccggatgccaggcactggagtatgccgccatggactgcccgatggcagatggcgtgaaagcatttttgatttggatttgaagaggtattgcaaggaagagcgttatggaggcaaccccaccagccacaccccggcacacaatgttcccgctgtggctgctgccttccggctctgaccaggttcacgggtaatcgttgcggggggaccgatggggtcaccataacgacgctggcctctcggcaagcggggccattgtaccgatctcatcggaagttacaaccgttggggccggattaaaaatatgaaggggttcaagtacttgtcaccgtcaacggcatctgtgggagggggcttgcccccgatgacggtacatcagccaataaacaggtgactgacccagcgccatcgggggcaatccccctcccacagcgctcatcattgtgccagtaccacctcatctgctcggccgccttcttcctggatcaccaggtgaatgaagtgcagcttggcgatcaccgctggaggcagcacaaagggataaaaatccggctggcccatgctgcgcgacagttcgttgagcatgccagccagttcgatccaagcgttgacgaatgacaggaatgccacgccgcccgggtgttcgggatcatagagcgtgctgaggggaaatggctggtaatccaggtccatctcgcgggcgctcatgccaaagccgagggcggtgtcgacggcatccatcatgtgcaggtagtgcgcccaggtttcagcccagtcttcccaggggtgcatggtggcgtaggcgctgacgcaggtttgctgccaatcggcgcgtgggccgtgctggtagtgctggtcgagggcgtcggcataactggcacgttcgtcgccgaacaggttgcgaaacggttcaagccagtgggtattggcgatcaggcgatcccagtaataatggccgacctcatggcgaaagtggccgagcagcgtgcgatagggttcgcgcatctggacgcggaccttttcccggtgggcgtcgtcggcttccttgatatcgagggtgatcaggccgttcgcgtgaccggtcatgggcgcgttgccctccaggtcgataccgacaaaatcgaaggccaggccggtgtcttcgtcgacgcttttgggcaccacttgcaaacccaggctgatcaattgcgcgaccaaccggcgcttggcggtttcgactttgcgccagcgctcgtggttttccgggatcgacaggtcaggaatggtgcggttcaggctgcatgccacgcacagcggcgcagtgctgtgcgccgggatcagccagttgcaggcggccggggtgtcgaggttggcgcagcggcggaaggcgccggcgtcgaggttaccgtcctgcagccaggtgccttcgaccgggccgggctgcagggagtccagccgggcttgttggggttggtagcccagcagcgcctggcaggccaggcactggctgttgcgaaagaacagcgattggccgcagcggcactgccacaccttgctgtcgcgggatgtgccggctacgaacggtgcagcgatgcgcgaactgagttgctcgaagtagcggaacatggcgatctctccctgggtgactgagactagatcactttctgttcaggatcgttccactttcgttagggttggggggctgctgcgcagcccgacgcggggcaagcccgctcgccacagcaagcccgctcgctacaaagtgcaaatcagacggtgatgttgtgcttggcaaggaaggagacgaaggcttcttcatccaataccttcaggcccagttcgctcgccttggccagcttggaacccgcccccggccccgccaccacgcagtgggtcttcgccgagacggaacccgccaccttggccccgaggctttcgagtttttccttggccacgtcacggctcatcagttccagggagccggtgagtacccaggtgtgccccgcttcgggcaaaccttcgacgaccttcttctcgctcaaccagtgcatgccgaagtccttgagctgctgctcgatggccagggcatggttggcgttgtctgcgttatcgaagaactcacgcacagccttggcctgcttttcgggcagcgcctggcgcatatccagccagtcggccttgatcacgccttccaaggtgccgaatttgtccgcaagtttctgcgcggcgccggggccgacgcttggcacatgcaacttgtcgagcaagccgcccagggtggtactggcggcgaattcggcactcaggtcgccctggtcctgcaattgcaggccgcattcgtctggcgacagcagcgcaccgatcacgtcctggttatggctgtcttcaaagaagctgtggatctcgtgcgccacttccaggcccacgtccggcaggtacgtcagcactgccggcaaggctttctgcacgcgctccagggatgccagcgaacgcgccaacaccttggcggtctcctcgcccacgtcgggaatgcccagggcgtagatgaaccgcgccagggtcggggtcttgctgttttcgatagcggtgatcagcttcttgctggaaatatcggcgaagccttccaggtcgatgatctgctcgtacttgagcttgtagaggtcggccggcgagccgatgagtttttcatccaccagttgctcgatggtcttgtcgcccaggccatcgatgtccatggcgcggcgcgagacgaaatggatgatcgcctgcttgagctgcgcaccacaggccagacgcccgacgcaacggtacaccgcgccttcgctgacggtttccttgcccttgctgcgcttgaccagttgcgtgcgctccacatgggagccgcacaccgggcagctctgcgggatcggcaccgcacgggcgtcttccgggcggcgctcaagcaccaccgacaccacctgcgggatcacatccccagcgcggcggatgatcacggtatcgccgatcatcacacccaggcgcgcgacttcgtccatgttgtgcagggtggcgttggacacggtcacgcccgcaaccttgaccggcttcaagcgcgccacaggcgtcacggcgccggtgcggccaacctggaattccacgtcgagcagttcggtcagctcttccatggccgggaatttatgcgcgatggcccagcgcggttcgcgggcgcggaagcccagttcacgctgggaggcgatgctgttgaccttgaacaccacaccgtcgatctcatacggcaggctgttacgccgctcgccgatgtcacggtagtactccaggcaatcctgaatgcctttggccaacttcagctcatggctgatgggcatgccccactgcttcaactgttgcaggttgccgatgtgggtgtcgctgatatcggtggtcacgccgtagcagcagaactccagcgggcggctggcggtgatcttcgagtccagctgacgcaggctgccggcagcggcgttgcgcgggttggcgaaggtcttgccgccgacttccagttgcgcggcgttgagtcgctcgaaaccggccttggacatgaacacttcgccgcgcacctccagggttgccggccagccactgccgtgcagtttcagcgggatgttgcgcacggtgcgcacgttgacgctgatgtcttcgccggtggtgccgtcgcctcgggtggcgccgcgaaccagctcaccgtcctgatacagcaggctgaccgccaggccgtccagcttcggttcgcagctgtattccaccgccgcgccagcgccgaacaggtcgcccaccggcaggtcgaggccttcggtgacccggcgatcaaactcgagcatggtggtttcatcaaacgcgttgcccaggctgagcatcgggatctcatgcttgacttgggtgaacgccgacaacgccgcactgccgacccgctgcgtcggagaatcgcgcgtcaccaggtccgggtgctcggcctccagggccttgagctcgtggaacaagcggtcgtactcggcgtccggaatactcggctcgtcgaggacgtggtagcggtagttgtgctgatccagttcagcgcgcagttcgaggatgcgggtgtgggcggcggtcatgggtgttctctcataaagcaaaagagcagccgaagctgctcaatatgttagtgcacggattctacagacaacgcttaagatcggacctcagcgcttctgtgtcagggcgcgacgctcgaactcgacgatgcgctgacggtagtgttcgatggtttgcgcggtcagcacgctgcgctggtcgtccttgagctcgccattgagctcctgggacaacttgcgggcggcggccaccatcacgtcgaacgcctgcttcgggtgacgcgggcctggcaggccaaggaagaagctcacggccggggtgctgaacaggtcgatatcgtccaggtcgaaggtgcccggcttgaccgcattggccatggagaacagcacttcgccgttgccggccatgctttcgtgacggtggaagatatccatctcgccaaaccgcaggccgctttcgaggatgttctgcaacagggccgggcccttgaagccagcagcgtcgcggcagatcacgctgatcaccagcacttcttcggcggccggctggtcgttcacggactggcgcggggcattcttgccggcgttttcgtcggggaaatcatcgtcgcggctgctgaagctcgggccgtcattgacgtcaaggtccaggtcagcctggcgcggttctgcgaccaccggagcggtgcgcttgccacgcttggatgacggctcgcgggcttcacgcaccggcgcgctcatcgacggcaagtcgtgctcgtccagttgcggttctttatgggtgtccagcacacggggcggccccagcagctcggcgctgccgtcgtcgtcgggcaagttggacaggttgcggtccagacggaatttgagcttgcccttgccaccgcgcatgcggcgccagccatcaaaaagaataccggcaatgacaataatgccgatgacgatcagccactcgcgcagaccgatttccatgtaatcccgtgcctctaataaaaaatgctgaaaaataaggggtttagcaacgtgcaaaccgctttaaaacgtggcgccaactctatgttctgactgacgttttgcccacgcatacgaaaatttgacattaaactagcacgaccaaagataactttacaccgtctgtcaaaatgccttgaacaaatatgtccatttgccactttcgccagaccggtaaagcctcttaccgcacgctacaaaaattctttgccggcatggatcaagactccaccatcgccatcgcttcttcgacatctaccgccaccagacgcgaacagcccggttcgtgcatcgtgacccccatcaactgatccgccatttccatggcgatcttgttgtgggtgatatagatgaactgcacggtctgggacatctctttgaccaaccgcgcgtaccgtccaacgttagcgtcatccagcggcgcgtcaacttcgtcgagcatgcagaacggcgccgggttcaacttgaagatggcaaataccagggccaatgcggtcagggctttctcgccgccggacaacaaatggatggtgctgttcttcttgcccggaggccgcgccatgatcgttacccctgtatcgagtagatcttcgcccgtcagttccaagtaagcgctgccaccgccgaaaacttttgggaataacgcctgtaaaccgccattaatctgatcaaaggtatccttgaagcggttacgggtttccttgtcgatcttgcggatcacgttttccagggtgtccagggcttccaccagatcggcgtcctgggcatccagataacgtttacgttcggattgctgctggtactcgtcgatggccgccaggttgatcgcgccgagtcgctggatacgtgcggcaatgcgctccagttcttcttcggcttctttctcgttggcctgggcggtcagggtgttgagcacgccgtgcaggtcgtagccgtcttccagcaattggtcttgcagggtcttgcggcgcacggtcagggcttgccattccatgcgctgctgttcgagctgaccacggatcaactgggattgctgttcggcctgggtccgacgtttttcggcgtcgcgcagttcgcggtcggcgtcttcgagggcgatctgcgcggtcttgagttcttcgtcgacggtcatgcgcttgtcgagcaattcttcgagcttcaggcgcagctcttccagcggcgcctcgccctcctccaggttgaggctcagttgctcgcgcttttcggtcaggcgttcggactgcatctccaggcgctcaagggcttgggcggtggacgcgtgctgggccttgagcgaccccaggcgcacggccaactggtgggcgtggtccttgtgctggcgcgcttcctggcgcacacggtcgaggcgttcgcgcaggctgtcacgctgggccagcaacagttcgcgctgctcggtatcgagggccatgctgtcgagggcttcctgcaactgcaggcgcgcttcgccgatctgttcgtgttccagggcgcgctgctcgcccatttccgcgacttcttcgtcgagacgggtgcggcgcagggtcagttgctcgaccttggctttgctcgcggaaagctgggccttcaattcgccttgctggcgcgcttcgtcctgcaacaggcggcgcaggtgttcgcggccggtctcttgctggcgctgggtggcacgcagggtttgcagttcgatttccaggctttccagggtggcttcgcgctcttcgcgctcggcgatcaggttgacgatttcctggccacgggccaacacgccgctttccgcttcactggcgcgacgcacgcgcaggaagtggcgaccgacccagtagccgtcacggctgatcaggctttcgccagcgcccaactgaacgcgctgggccagggcctgctccaaagagtccactggcttgacctggcccagccacggcgacagatcaatcgccgcttcaactttatccagcagactccctggcacccgcgtaccgtcagcagctgggctgagcaaacgcaggtcgccctgggcaaaaccggccaggtcgaagccgccaaagtcatccaccaacaccgcttgcaggtcggcgcccaagacagtttccaccgccagctcccagccggcctcaactttcaagccttccgccaaacgcgggcgctcggccaggtgctgatcgcgcagccattcggcggtgccggtgcctgggtctaatgcagcttgctgcaacgcctcaagggaggccagccggccatcgagccgctgcaaatcaccctgggcctgttgctgtgcctgggtcgcctgttgcaactgctgacgcaactgctccaggcgttccacttgttgttcttcgctggcttccagctcttccagcgtcatttcgctttcggccagttgctcgctcagctccatgatcgccgcgtcttccgggtcggcggacagcaacgcacgctcttcctgcatacggcgttggcgctcggccagacgctccatactgctttccagctgctggatgcgtgactgctgcacttcggcctggcgccgtggttcggcagacttcaggttgaaggtgtcccactgctcctgccagccatgcatggtggcttcggattcttccagggcggcggcggcctcttcggcggcggcactggtgacttcctgctcaggggtgagcatgtccagctcttcgccgagggtcagcagcaaggtgcggtcgtggcccaggtgggattcggtctccaggcgcgcgcgctcggcttccttgaggtcatcctgcaactggcgcaggcgctgctggccgtgctggatgctctgctcgacgcgggcgatatcgcctcccaccgaatagaagcggccctgcaccagattgaagcgctcggacaggtcatgatgaccgtcacgcaggcgttcgatgctagcgtcggcattgcgctgctcggccaccagggcttcaaagctgatctcctgggtgccgatgatcgcttcgcgctggcccacctggtcattcagcgcctgccagcgcagggccgacagttgtgccttgagctggcgttcctcacccttgtattcctgatacttctcggcggcctgggcctggcggtgcaggcgctccaactggcgctccagctcttcgcgcaagtcggtcaggcgggcgaggttctcgtgggtgcggcgaatgcggttttcggtctcgcggcggcgctccttgtacttggagatgccggcggcttcttcgatgaagttacgcaggtcctcgggcttggcttcaatcagcttggagatcatgccctgctcgatgatcgagtagctgcgcggccccaggcctgtgccgaggaaaatatcggtgatgtcccgacggcgacacttggtgccgttgaggaagtagctgttctggctgtcgcgcgtcactttgcggcggatcgaaatttccgcgtaggccgcgtactcgccgatcagggtgccgtcggagttgtcgaacaccagttcgatgctggcctggctcaccggcttgcggctggtggagccgttgaagatgacgtcggtcatcgactcgccacgcaggttcttggccgagctctcgcccatcacccagcggacggcgtcgatgatgttcgacttgccgcaaccattgggcccgaccaccgccgccatgttactggggaagttcaccgtggtcgggtcgacgaaggatttgaaccccgccagtttgatgcacttgagccgcacgtttaggcgtccgccaacgcagcgatgaccagcgagcaactgcgctggccgtacgccgacagcaccaggcgaatctgcggcaagtcacgggcaagtacggcggcaagcagttgctcgaacaacgccaggtattcgctcatggaggccttgcgttgatccagcgccaggtaataggcgcggttcatcgccggctgcaggttctcgacggtttcctgcaaatacgggttattggcgaaggggtacgcggcgcgcatcacgttgaagctttcttcgacgaaagcgcggatgtcctcgcgctcgtaactggtcaccaggcgctgctggatctgcaggaacggcgccatgtcggcctgcacctgccagccctgggccaccgcattgccgagcaggatgtacagctcgcccatcaaggtgcacaggctctgcaccttgtgcgccgttaactcggtgacgtgggcgccacggcgcggaaggatcgcgatcaggtgacggcgttcgaggatcagcaaggcttcgcgcacggaaccacggctgacattgagcgccagcgtgaccttctgttcctggatccgctccccaggcttgagatcgccgcgaatgatgcgttcggcgaggtggtgagcaatttgctcggcgagactgtccggcgccttgaacgtcatgttttcccttcaaaatcttctatcggtacaagcgcggcagtgtagcgcattggctggctgatggcgctacgcccaccgtggcgaatttggcacggaataagcagcgatgaacagccacaagcccccaaaaacaccggttccagaagactggaccataattgaaagtgttgcgatcgcattttcttgaccttccggtcagaaaatcattgaccgaaaagtcagagatgactagattcggcgcaaagcggttaacaacaataatgagtctgcgaggccttccgtgatccagtttttacttaaccaggaactccgtagcgagcacgccctggaccccaacctgaccgtgctcaactatttacgcgagcatttgggcaaatccggtaccaaggaaggctgcgccagcggcgattgcggggcgtgcaccgtggtggtgggcgagttgcacaccgatgatcagggcgccgagcagattcgttatcgcagcctcaattcgtgcctgacctttgtctcgtcactgcacggcaaacaactgatcagcgtcgaagacctcaagcaccagggccagctgcacagcgtgcaacaggccatggtcgagtgccacggttcgcaatgcggcttttgcacccccggtttcgtgatgtcgttgttcgccctgcaaaagaacagcgaagcccccgacagccagaaagcccatgaagccctggccggcaacctgtgccgctgcaccggctaccgcccaatcctcgccgccgccgaacaggcctgctgcaacaagccccaggaccagttcgacagccgtgaggcgcagaccatcgcccgcctcaaagccatcgcgccgacccagactggagaactcaacagcggcgacaaacgctgcctggtgccgctcaccgtcgccgacctggccgacctctatgacgcctacccgcaagcccggctgttggccggcggcaccgacctggcgctggaagtgacccagttccaccgcaccctgccggtgatgatctacgtcggcaacattgaagaaatgaagcgcatcgacgacttcgacgaccgcctggaaatcggcgccgccaccgccctctccgactgctacaccgcgctgcaccatgcctacccggacttcggcgagttgctgcaccgcttcgcctccctgcagatccgcaaccagggcaccctgggcggcaatatcggcaatgcgtcaccgatcggtgattcgccgccgctgctgatcgccctcggcgcgcagattgtgctgtgcaagggcaatacgcgtcgcaccctggcgctcgaagactacttcatcgattaccgcgtcaccgcccggcaggacagcgagttcatcgagaaaatcatcgtgcccaaaggccacacgctgttccgcgcctacaaggtgtccaagcgcctggacgatgatatttccgccgtctgcgccgcgttcaacctcaagctcgacaacggtgtgatcagcgacgcccgcgtagcattcggcggtatggccgccacacccaaacgcgccaaaaactgtgaagcggtgttggtcggtgccacctggaacagcgccaccgtggaaaaggcctgcgccgccctggcccaggacttcaccccactgtcggacttccgcgcgagcaaggaataccgcctgctcagcgcgcagaacctgctgcgcaaatacttcatcgaactgcaaacgccgcacatcgagactcgggtgaccgcttatgtctaaccatcacgccgtcgttaaaacccaggccgaactcgccgcactgtttgcccaggacctcacttccggtgtgggccgcagcgtcaagcatgacagcgccgccaagcacgtatccggcgaagcgcagtacatcgatgaccgcctggaattccccaaccagttgcacctgtatgcacgcctgtccgaccgcgcccacgcccgcatcatcagcatcgacacggcgccctgctacgcgtttgaaggcgtgcgcattgtcatcacccatgaagacgtgccgggcctgaaagacatcggcccattgatgcccggcgaccccttgctggcgattgatacggtgcagttcgtcggccaagtggtgctggccgttgctgcgcgtgacctggaaaccgcacgcaaggccgccatggcggcggtgatcgaatacgaagacctggagccggtgctggacgtggtcgaggcgtttcgcaaaaagcacttcgtgctcgacagccacacccaccagcgcggcgattcggccggcgcactggccaccgcaaaaaaccgcatccagggtaccctgcacatcggcggccaggaacacttctacctggaaacccagatctcctcggtgatgcccaccgaagacggcggcatgatcgtctactgctccacgcagaaccccaccgaagtgcagaaactggtggccgaagtgctcgacgtgtcgatgaacaagatcgtggtcgacatgcgccgcatgggcggtggtttcggtggcaaggaaacccaggcggccagcccggcgtgcctgtgcgcggtggtggcacgcttgaccggccagccgaccaagatgcgcctgccgcgcgtggaagacatgctgatgaccggcaagcgccaccccttctacatcgaatatgacgtgggctttgacgacaacggccgcctgcacgggatcaacctggaactggcgggcaactgcggctgttcgccggacctgtccaactcgattgtcgaccgtgcgatgttccatgccgacaactcgtattacctgggcgatgcaacggtcaacggccatcgctgcaagactaacaccgcgtccaacacggcctatcgcggcttcggcggcccgcaaggcatggtcgccatcgaagaagtgatggacgccatcgcccgtcacctggccctcgacccactggccgtgcgcaaggccaactactacggcaagaccgaccgcaacgtcacccactactaccagaccgtcgagcacaacatgctcgaagagatgaccgccgaactggaagccagcagccaatacgctgagcgccgcgaagcgatccgcctgtacaacgcccacagcccgatcctgaaaaaaggcctggcgctgaccccggtgaaattcggtatctcgtttaccgcgagtttcctcaaccaggccggtgcgctgatccatatctacaccgacggcagcatccacctgaaccacggcggcaccgaaatgggccagggcttgaacaccaaggtcgcgcaggtggtggccgaggtgttccaggtggaaatcgaccgcgtacagatcaccgccaccaacaccgacaaggtgccgaacacctcgccgaccgccgcctccagcggtgccgacctgaatggcaaggccgcacagaacgccgccgaagccatcaagcagcgcctggtggaattcgccgcacgcaagtacgacgtgagcgaagcggatgtggagttccacaacggccatgtgcgcgtgcgcgagcagatcctgacgtttgaggcgttgatccaacaggcgtatttcgcccaggtctcgctgtcgagcacgggcttctacaagaccccgaaaatcttctacgaccgcagccagtcacggggacggccgttctactactacgcgttcggcgcggcgtgctgcgaagtaatcgtcgacactctgaccggcgaatacaagatgctgcgcaccgacatcctccatgacgtgggcgcgtcgctgaacccggccatcgacatcggccaggtcgaaggcggcttcatccagggcatgggctggctgaccatggaagaactggtgtggaacgccaagggcaagctgatgaccaacggcccggccagttacaagatcccggccgtggccgacatgccactggacctgcgggtgaagctggtggagaaccgcaagaacccggaagacacggtgttccattccaaggccgtgggcgagccgccgttcatgctcgggattgcttcgtggtgcgcgatcaaggatgccgtggcgagcctgggtgactatcgccatcaacccaggatcgatgcaccggccacgccggagcgggtgttgtgggggtgtgagcagatgcggcagttgactgcggcgaaggtggttgaggcggataccgagatggcctcgctctagaccgaggcgctgccatcgggggcacgccccctcccacactttgatctgtgaataccttcaaatgtgggagggggcttgcccccgatagcggcctgacagacaccacaagaggtgactatgaacaactggatcagcgccctcgccgacctgcagaaccaaggcgaaccctgcgtgctggtgaccatcatcgaagagctcggctccacgccgcgcaacgccggttcgaagatggtgatcagtgccacgcagaccttcgacaccatcggtggcgggcacctggaatacaaggcgatgcagatcgcccgcgacatgcttgtgcgcggccagcagaacacccatctggagcgcttcagcctcggcgcgagcctgggccagtgctgcggtggcgtgacggtgttgctgttcgaacccatgggccaggtgcaggcgcaaattgcggtgtttggcgccggccacgttggccgtgcgttggtcccgttgctggccagcctgccgtgccgggtgcgctggatcgattcccgtgatcaggagtttccagcacatatcccccagggcgtgcgtaaaatcgtcagcgaagagccggtcgacgaaattgccgacctgtcggcgggcagttactgcatcgtcatgacccacaatcatgcgctggacctggaactgaccgccgccctgctcaagcgcaatgacttcgcctacttcggcctgatcggttcgaagaccaagcgcgtcaagttcgaacaccgcctgcgcgatcgcggcttcgacgccgcgcagctgcaacgcatgcgctgccccatgggcctcaccgaggtgaagggcaagttaccggtggaaatcgccatctccatcgccggcgaaatcatcgccacctacaacgccaatttcggccagcacaccgccagcgccgaacccattgccaaactgctgccggcttcacgtcgcagccaagccatttgaaatgagatcaccatgcctttgactcgcaaagcctaccgtgccgccctgctgcacagcctcgccgaccccgctgaagtgggcatcgaagcctcctacgagtacttcgaagacggcctgctggtgatcgaaaacggtcaaatcagcgccatcggccgtgccagcgatttgctgccgaccttgcccgccgacatcgacatcacccattaccaggacgcgttgatcaccccgggcctgatcgacactcacatccacctgccgcagaccggcatggtcggcgcctatggcgagcagttgctcgactggctcaacacctacaccttcccgtgcgagagccagttcgccgacaaggcccacgccgaggaagtcgcggatattttcatcaaggaactgctgcgcaacggcaccaccaccgcgctggtgttcggcagcgtgcacccgcagtcagtgaattcattctttgaagcagcagaaaaactcgacctgcgcatgatcgccggcaaggtgatgatggaccgcaacgcgccggactacctgaccgacaccgctgaatccggctaccaggaaagcaaggcgctgatcgaacgctggcacggtaagggccgcctgcactatgcggtcacgccacgctttgcgccgaccagtacgccggagcaactggcactggccgggcaactgctgggcgaatacccggacctgtacatgcagacccacatcagcgagaacaagcaggaagtcgagtgggtgaaggagctgttcccggagcgcagtggctatctggatgtctacgaccactacaagttgctgggcgagcgttcggtgtttgcccatggcgtgcatttgtgtgatgacgagtgtgcacggttggcgcagacgggttcggcggtcgcattttgcccgacctcgaacttcttcctcggcagcggtttgttcaacctgccgatggccgaaaagcacaaattgaatgtgggcctgggcaccgatgtggggggcggcaccagtttctccctgctgcaaaccctgaacgaagcctacaaagtcatgcagttgcagggcgcacggttaagcccgttcaagtcgctgtacctggcgaccctgggcggtgcgcgggcgctgcggctggaagacaagatcggcacgctgcaaccgggcaccgatgcggacttcctggtgttggactacaacgccacgccactgatgagctatcgcctgaagcaggcgaagaacattgccgagacgttgtttgtgctgatgacactgggggatgatcgcacggtgttgcagacgtatgcggccgggcaattggtgcaccagcgctaattccataaacaccccaaaacaaatgtgggagggggcttgcccccgatagcnnnnnnnnnnnnnnnnnnnnnnnnnnnnnnnnnnnngctatcgggggcaagccccctcccacattgttggtcgtatttacaactttatggacgagcgccccggcttcttggtctgcaacaaatgcgaaaacaccgcatgcaggtcatccgacgcgctctcttcatcgaggttgagcttgctgtcgatgtgatccatgtgatgcatcatcaaattcactgccaacgccgcatcccgtgcttcgatcgcatcgatcaactgggtgtgctcgtcataggaacagtgcgagcggttgccgctttcgtactgggcgatgatcaatgaggtctgggacaccaggctgcgctggaagctgatcagcggcgcgttcttcgccgcttcagccagcttgaggtggaactcgccggagaggcggataccggcaccgcggtcaccacgggaaaagctgtcgcgttcgtcgttgaccatctggcgcagttcggccagttgctcagccgtggcgtgttgcaccgccaactcagtgatcgcccgctccaccagacgccgcgccaggaacacctggcgtgcctcctcgacgcttgggctggccactaccgcaccgcgattgggccgcagcagcaccacgccttcatgggccaggcgcgacagcgcgcggcgaatgatggtgcggctgacgccgaagatttcgcccagtgcctcttcgctcaacttggtaccgggtgccaggcgttgttcgaggatcgcctcgaagatatgcgcgtagacgatatcgtcctgggttccgctgcgaccggccttgccggcacgcggttgtttcttgagaggttgcaactgttcgttcatgggcactcgggtttggagaacggcggcgaattaacggtaatacggcaacagcgtgtcgctggcaagtatcacctaaaaacagggcacattgtacacaacccactgcgccaacacactgtacggctgtttgcggcgtcggctgtattgcaatgagtcgctgcgtttgagtttaggcttgaatccgcaacttccctggtaaaaggaacacctgttcatgaccgacgccacccaagcgcctctgcgcccactggccgacacctctgcgtcggccgtcgtcgccggcttcatcgccatgatgaccggctacaccagctccctggtcctgatgttccaggcggggcaagccgccggtttgaccacggcgcagatttcctcatggatctgggcgatttccatcggcatggcggtgtgcagcatcggcctgtccctgcgctatcgcacccccatcacgattgcctggtcgacacccggtgccgcgctgctgatcaccagcctgggcggtgtgagttacggcgaggccatcggcgcgtacatcacctgcgcggtgctggtgacgatctgcggcttgaccggcagctttgaaaaactggtcaagcgcatccccgcgtcactcgcggctgctttgctggcggggattctgttcaagatcggcagcgagatcttcgtcgccgcacagcatcgcaccgggctggtgctggggatgttctttacctacctgatcatcaaacgcctgtcgccacgttatgcggtgctggccgcgctgctgatcggcaccgcgctgtcggggttgatggggctgctggacttcagcggtttccacctggaagtagcaacccccgtgtggaccacgccgcacttctcgctggcggcgaccatcagcatcggcatcccgttgttcgtggtagcgatgacctcgcagaacatgcccggcatcgccgtgctgcgggccgacggctacaacgtgccggcctcgccgctgatcaccgccacggggctggcgtccctggtgctgtctccgttcggctcccacggcatcaacctggccgccatcagcgcagcgatctgcaccgggcctcacgcccatgaagaccgcaacaagcgttataccgctgccgtgtggtgcggggtgttctacgggattgccggggtatttggcgcgaccttggcagcattgttcgcagccttgcccaaggaactggtgctgtcgattgcggccctggcgttgtttggctcgatcatcaatggcctgagcatcgccatgaatgagccgaaggaacgtgaagcggcgctgatcaccttcatggtcacggcgtctggcttgacgctgttttccatcggctcggcgttctgggggattgtggcgggggtgttgacgctgctgatcctgaactggcgtaaggcataaaaaaacggcgaccttcaggtcgccgttttttttcagtatcacttagccgcgttgatcggcttttccggataccacacgtccagcagcgggctgacttcagccttggtcagctcggaacggtttttcagccaggcttcaacggccgcacgttgctcttcggagaccgagccgcgcttctgcaggcaaaccagaccgtagtcatcgccgccgacgtagcccaggccattggcttccatggcttctttgatgaatgcttcgaggaaagcgtcgatagcttcttcactcaggccttcgttgaagtccaggttcagttcgaaacccagctcttgaaattcatcaacgcacagttttttgcgcagacgctgggaacggttagtcgccattggaacaatcctcataagtaataacgggcggcactttagcagtttaaggcggcgattgcccgattctctgggacaggcggcacaacgcctgtgaaaaaaacgccgaatacccgctatggttcagctacaagtggcttaaccttggggcataatgccgacactttcatgaccattgagggatttttcttatttacccctcgcctttttcaccctcctcagcagtagggttttacttcttatgatcaaatcgttgcgttccgtcttgtttgccggttttattctgccactggccttttccgtctccgctgcccccgtcaacaacaccctgccacccaatgttcaacaggcgctggccaaagccaaactgcaaaacactgcgctgtcgttggtgatgatccccctgaacggcccgggcacgcccactgtgttcaacgccgacgtgtcggtgaacccggcctccaccatgaagctggtcaccacttacgcggccctggaaatgctcggccccaaccaccagtggaaaaccgagttctacaccgatggcaccctcagcggtggcgtgttgcacggcaacctgtacctcaagggcggcggcgatcccaagctgaacatggaaaaactctggctgttgatgcgcgacctgcgcgccaacggcgtacagcaagtcactggcgacctggtgctggaccgcagtttcttcaatcagccgcagttgcccgaattcaatgacgacggcaacgacgaaaacaaaccattcctggtcaagccggacgcgctgctggtcaacctcaaggccttgcgcttcgtgacccgcaatgattcaggccgggtactggtgtcggtcgagccgccgattgccagcatccgcatcgacaaccaggtcaaggtctccaacgccaagcagtgcaccggcgacgtacgctacaacccggttaccgccgccgatggcagcgtgacggtaacggtcagcggccagttggccgacggctgcagctcgcagacctatctgtcgctgctggaccacgccacctataccgccggcgccgtccgggcgatctggaaggaactggggggcaccatccagggccgtgacatccaggcgccggtgcccaaggatgccaaggtactggcccgggcattttcgccggacctggcggaaatcatccgcgacatcaacaaatacagtaacaacaccatggcccagcagttgttcctgagcctgggtgcgcagttccgcaatgatgccgatggcgacgatgccaaggctgcacaacgcgtggtgcgccagtggctggcgaagaaaggcatcaccgcaccgcacctggtgatggagaacggctccggcctgtcccgtgccgaacgggtcagcgcccgcgagatggcggccatgctgcaagccgcgtggaaaagcccttacgcggcggaatacatcagctcgatgcccatcgccggcaccgacggcactatgcgcaaacgcctgaagaccaccgccatgcgcggcgaagcccacgtcaagaccggcaccctgaacaccgtgagagccatcgccgggttcagccgcgacaacaacggcaacacctgggccgtggtggcgatcctcaatgatccaaagccatggggtgcttcgtcggtgttagatcaagtgctgctggatttataccgccagccgaaggtcgccgcggcagcaccggtcctgtaggagcgagcttgctcgcgaaaaactcaagaacaccgcgtttatcctggatagacgcgatgggattgacgatcttcgcgagcaatctcgctcctacagaaaagcatcaagcgcgcaggcgctccgtctccacccgatccctgcccgcctgcttggccacatacacggccgagtcggcgcgcagcagcagcccgtcgataccttcatccacccgccaactggccacgccgaagctggcggtgacgatgcctaccggttccatcggcgcactgcgcagcgacgcccacaactccatcgccaggctgtaggcctgagcgccatcggtgtgcgggcacaacaccatgaattcctcgccgcccaggcggcagaacacatcggtacggcgcaggcgctggctgatgcgtttgcacaactcctgcaataccccatcgccgacggcgtgcccatgctggtcgttgatgcgcttgaagtgatcgatatccagcatgatcaccgacaaagcccccgaggtgcggttgagcctgaccatctcggccttgaggcgatcctggaaatagcggcggttatggatcccggtcagggagtcggtgatggagagcgcacgcagctcttcttccacccgtttcagatcggaaatgtccgacacgtagccgtgccacaacgtgccgcctgcgggtaactcttccggagtggcttcgccacgaatccagcgcaggccgcggtgcggcaacagcacccgatactcctcacgccaatgactcaactgcaacgccgacaagcggatcgaagcgcgtacccgctccgcatccagcgggtggatgcgctcgaagacctgcttggcatcctgctgcaatatgctgggctcgatttcatagatgtcgcgcatgccgtcgctggcgtagataaatttccagttgtcgtggggttctaacgtgaactggaagatgccgccgggcacatgggcgctgagtttcttgagcagccgatcccgggccgccaatgcctcgtaggcgcgcttttgttcggtaatgtcgaggtaaatcgccaggtgaccgatccacaaaccatggtcgtccagcaacacggtggccaacatgttcaccgtcagttggctgccatcctcacgtaccagggtccactcgcgggcttcgtgcaggttgtcggggctttccaccagcatcgcctggcttgccgggatgcgtttgcccagggccacactgaggctggcggagcgcgcttcgagttccgacgccaggtgcaggctttccagggtgtgcgtgcccatcacctgctcggccttgaaccccagcatctgctcggcaccggcattgaaggtattgatgacaccgcgcaggtcggtggcaatgatcgcgacctgcgttgcggcattcagcacactgcgcaattggccatgggcgccgcgtaactcctgctcgcgcaggcgcaactgcgccgtgcgctgctccaccagtttcaacgcgcgctggcgttggctgaccagcacatagagcagcgcgctgagcaacaggctgagcaggccgcccatggtcaggatcgtgctcaacgaggagtggttggcctggtcgaacacttggctcgggcgcagtttcagggcatacacatggtcgcccagcgtgaggcggcgcgctccgacaagatcaccgccggccacggcattgccggactcgaacagtacgcgctgttgcacgtcggaggtgtcgatgatctgcatcaccaggttgtcgcgatccggcttgggcaaaccgtcggccaccaactggcgcatgctgatcaccgccatgacatagccgtagggctcattctgggattggtcggaggtaggcaaatgactcaccggcgcgaccaatagaaccccggtggcataggccggttccacgcccaccagttgcatgggctgggacaccgccagcttgccggtcttttgcgcacgctcaagggccgaacgccgcaggggctgggccagcaagtcaaaaccgaggggtgcgcccagcaggctttgggtctggctgtacaagaccggcacgtattcatcgcgctcgggcgcaggggccaactcacccagtgaattcaactcacggataacaaaaggtgtgccgcgctgctcggacgcagttcgctcgaactgactgcgctgttcgcgatacacacggggcgcccaggagtaagcgcgcgcccgcagtagtaagggctgggcaaaaccgtcgaattcttcgcgggacacgtcatcggaattgacgaagaaacgccgcaggctgttcaggcgttgctcctgatcatcgaagcgttcctgcaggcgggtgtagcgctcgttgaccagcatctgaaagcgttggcgcacttgctgctgatagaggtcggcggcggcccaggcaacaacagccgtcaaggcaaacccggccagcaataccaccaatgccaccagccaagccgacgcctgttcactgataaagcctaggattttcgggcgaacggcttgcaacggcataggtaacactcacaacgccagcgtgcggggggtgtcacttggcttggccttaagttatagccatcgaccttgagtttgaccagcgtaaaaaagccgcaaacccggaataatccaggcttacggctcttttaacagcagggatcagcgcgcggtgattttccatgcccggtggatcttcgcattgcgtgcgaagtcggggtcgatggtcttgtcgctgatttcctcgaccgcatagcgctcgctgaggttgtcctccagtgcgaacttgcggaagttgttcgagaagtacaacacgccgcccggcgccaggcgcgccatggccaggtcgagcaactgcacgtggtcgcgctgcacgtcgaagataccttccatgcgcttggagttggagaaggtcggcggatcaatgaagatcaggtcgaactcatcgcggctcgcctccagccaggccatcacgtcaccctgctccaggcggttcttgtcagagaagccgttgagggacaagttgcgacgggcccagtccaggtaggttttggacagatcgacactggtggtgctgcgcgcgccgcccttggccgcgtgcacactggcggtggcggtgtagcaatacagattgaggaagcgcttgccggccgcttctttctggatacgcagacgcatcgggcggtggtcgaggaacaggccggtgtccaggtagtcggtgaggttgaccagcaacttcacgccgccttcgctgacctcagtgaacttgccctgggcgctctgccgctcgtactgcttggtgccgctttgacgctcgcggcgcttgactaccacgcggctcttgtcgatgttcagcgcctggggaatcgcggccagcgcatcgaacatccgcgcggaagctttttccgggtcgatggacttcggcgcggcgtattcctgcacgtggacccaatcgtgatacaggtcgatggccatggagtattccggcatgtcggcatcgtacacgcggtagcaatccacaccttcgcgcttggcccacttgcccagtagcttgaggttcttttgcaagcggttggcaaacatctgcccgccttcactcaggcgcgcctgctcgaccaccggggcaggagcgggtttgatcgggttaccgttcttgttgtactggcgctcttgcggctcggccggggcctggtcgtaggcagcttgctcacgttcggcctggcgctgttccggggtgcgacgctcgccggtgacaaactgatccgggttgaccttgatcagcagcaatttgcacggcaacgcaccgttccagaacgaatactgcttgtggctacggatgcccatgcgcttgcccagatccggcgcgccggtgaacaccgcggcttcccagcccatgcacgcctggcgcagacgctcgccgaggttctggtagaggtacaacaggctggcttcgtcacccaggcgctcgccatacggcgggttgcagatgaccaggcctttctggttctggtccgggcgcggctcgaaggtgccgacttcgccctggtacaccttgatccagtggctcaggcctgcacgctcaatgttgttgcgcgcaggctggatcagccgcggatcggcttcgtagccacggatccacagtggcggcttgttcatgccgatggcggcgcgttcagcggcctcggcatgcagtttcttccacagggccgggacgtgaccgagccaggtggtgaacccccacagctcgcggttcaggttgggggccatgtcagcagcgatcattgcgccttccaccaggaaggtgcccacgccgcacatcgggtcgctcagcgcgccgccttcagcggcgatgcgcggccagccggcacggatcaggatcgcggccgccaggttttccttcaacggtgccgcaccctgctgcaggcgataaccgcgctggtgcaggctgtgcccggacaggtccagggacaggatggcttcgccacggtccaggcgcaggtggatgcgcaggtccgggttgatcttgtcgatggacgggcgatcgccggtcggggtgcgcagcttgtcgacaatcgcatccttgaccttcagcgcgccgaagtgggtgttgtcgatgcccgaaccgtggccgctgaattcaaccgccagggtgccgtcggggaccatgtggtcggcccactcgatatccagcacgccgtggtagaggtcttcggcgtccttcatcgggaagcgcttgagcaccagcagcacgcggttggccaggcgtgaccagaggcacaggcggtaggcggtttccatgtcggccatgccgcgcacggccgaggtgtgctcgcgggcgtccgtaaggccaagcccgacggcttcctcgatcagcaggccttcgaggcccttggggcaggtgaggaagagttcaaaacggtccgacatggggcattccaggcttttcagcaataaatgaacgggcgacgcatcgccggctcggttttcaatcaagcacttttcttgaagagtgctcgcgtggcacgaatgtgccgtcccaccccggctgccgggccttagggcctttagtgacggggcagataaacaattggctgtaacaaaaagaaatattccgacccttcgtcgaataataactgactgcaacgggcggacattctcactaaaggattaaacccatcctctatgcagggtgcatcatagctggctttgcccaataaaaggggcgaaaaaccatcccagcttatggctatagcatcgttatcgttacgtgcttatgacaaaacgatcattgaatccatgtgacctattggttagaactcaacacaggttggcgccgtaacgacgccgacacatcggctcgccacgccggcagcgagcccaccaacggcagaaaaactctgcccggcctcggacgaggccgaaggatatcaagacagtcaacaagtgagggaaacaccctatgagaagacttaagcgtgatccgttggaaagagcatttttacgcggatatcaatatggcgttcatggcaaatcccgtgagctttgcccatttactctaccgtcggtacgccaagcctggatcaacggctggcgagaaggacgcggcgacaactgggacggtatgactggcactgcgggaatccacagactcaacgaacttcacgccgtcggctaatcaagggcaattaattccgacaccacctttggatttgtaacgacttaccatgcacgccccatccgggcggcgggcttcggcccagggggctccttttcaggggccctttttaatgggtcgctttcaggcttttggcaatgctgcgatggcatctaccgactggcgaatcagcgccgggcctttgtagatgaagccggaatacaactgcaccaggcttgcgcccgcggcaatcttctcggccgcatgcttgccttcggtgataccgccgaccgcgatgatcggcaagcgcccggccaactccgcagccagcaccttgacgatatgggtgctcttgtcacgcaccggcgcgcccgacaggccgcccgcttcgtcgccatgggccaggccttcgacacctacgcggctgagggtggtgttggtcgcgatgactgcgtccatccccgagtccaccagggcctgggccaccagcacggtttcctcgtcgctcatgtccggcgcgatcttgatcgccagcggcacgcgcttgccatggcgcacggccaggtcttcctggcgctggcgcaaggcttcgagcagttgcttgagggagtcaccgaattgcaggctgcgcaggcccggggtgttgggcgagctgacgttgaccgtaacatagctggcttgggcgtagaccttgtccaggcagatcaggtaatcgtccacggcgcgctcaaccggcgtatcgaagttcttgccgatattgatgcccaggatgcccttgtatttggcggcctgaacccgcgacagcaagtgatcgacgcccaggttgttgaagcccatgcgattgatgatcgcctcggcttccggcaggcggaagatacgtggcttggggttacccggctgcgggcgcggggtcacggtaccgatttcaacgaaaccgaaacccaactgcgcaaacccatcgatggccgcaccgttcttatccaggccagccgccaggccgaccgggttggggaagtcgagccccatcaccgagacaggcatgtttgccggtgacttgcataccaggccattgagccccaggcggccaccggcaccgatcaggtccagggacagatcgtgggaggtttccggggagagtttgaacaacagctggcgggccagggtatacatgggcgggctagactcggatggcggcgaaaggtgacggcgattatagccggggtcacgggtagcgcgcgaggcgtgaacctcaatcgtcagtggcggtgcgctaccaactgctcgtaatacgcccagattttctgggcatactgcatgcgcaacgcctgacgcgcaggcccggaacccgggcctgcgttgtaggagcctatcgccgtccagttgtagccaaagcgctggatgaactcggcgagaatcgaagcccctacctctaccgacaggcaaggctcattgagcaaccgctcctcggtaatacctcgctcgagcaggcgcggcaaatggctgctgttgatctgcatcaggccgatgtcccgagtaccattacggttcgcactgtttatcgcctgcgcacgaaagcccgactccaccgcagcgatcgcctgcagcagttcgggctcgatgtcgtagcggctggccgcctcctcccagcaataggccagcgcctgattgccggtcatcatcacccccaacaccaagcccttgctccagaacctaaccacgggttaccgctccatggcgggtctggccgcatgccgagcacacatctgccatgcggcccgacacatcgccctcgacctttaccgggcagatgaaccggtaccctcgaccataaatcgtcttgataaaccccttgtcggtggcaaggtacttgcgcagtgagtaaatgcagcgtgtcagcgactcttcggcgacttccccttgcggccaagccagctccagcaagcgatccttggtcatcaacacaccaccggacatcagcaacaatcgcagcaccagcccttccttgggcggcaactgaacatccgcgtcttcaccagtcaggcgaccatcgtcgtgcagggtccaacgcgcaaacaccagggaagtcgtcgtccctccatcatccatgacagccatgattacctcggcatccgactactgacattgaagtcctcatttgcattacgggttcaagtgcccctgtcacgactataaaaacctgcctcagggctcacgctaggacaaagcgcagacatcccgcgttttttggaaccacgctgtaagacgtttctctacccatcagcatcaggtagccatgcgtggtaaacctcgtgcagctcaacccccaaccggtcttccaactgcaccaactcacccaaggccagtaattgcccgttaacccgaacctccacgcaatggattatctccggcatcaacggcaacaccttgccgggcgcaaacgctgccaggcgccggcggctgatcaattgttcctgaagaagaatttccagatgcatcggctaacaccttgttcacggtgagacatcgcgctcaggccgtacaaacgcacgttgaacgcgctcgtattgtgctgctgtcaaaggcggcggccctgcccccccacccggccccagcgcctcgctgcccacggccctggcctgaatcacaaacagacgcacttgatccgggcgagcagccgcccgcccttctgcctctcgttgaaacgcgcccagccacagacgcctgccctggggcacacgcaccacactgttgacccccacctgcgccaccgccgtgtttttttcacgccgacccttctcactcctctggtgcccctcctcaatctcaaggcgcatttcgatctggttagcttcggaaaaacgcggcagtacgctgacctgagtgccatagcgcacaggtttccagtcaattcggtcgtttcccgggggcggtagataaaaggtatggctatcctgaaacaccgccggaacgttctcctgagtgagaatcacgggcagtgtcaccaccttcgcccgtcgacgacgctccaatgcagcgatcctggccatcacgcggttgtcatcccgaggcgcaaagattcgcgtggtcgacgtcttggcgtcttcgtccctgcccaggcccagcttctccagttcagtgcgctccacatccaccagccacagcgacacttcgatcggtcgcttgggtatgtcgagttccgccaccagtttctggatgaaactcacctgggccggcttgcccttgatcagcaggctgttgctgtccgggtaggcgatcacaccaaggctcttgtcggacagcaaccccttgtgctcgctggccagcagggtcttgatcatcgacgccatccccggcacggttaccgggttgtcacgtgtgccgtactgacggtccgccacatcggtgttgagcacttgaaccacaccaaaggcttgcgcgcccacacgcaagtcggctctttgccggtccatcaattgggccaggcgcatcacttggtcgacgtaattcggtgggccggacacatagaaagtgcgcgctccactttcacgcagggggtggcgtgactcatcgaggcccgagcggcgcatgaggccacgcaacttgtcgacggtaatatgccgcaaggtcaccgcagagctctttgcctcgtcggcatcgtagatatgcagcgcttgcccgtcgccgtgccagatcaacccctgttcgagcgcaagcgcttccagcgcctgttgcggcgcatcgaaatccagcgcagtgctgagacgtttgcgcgccaccgcctgactgacaacgatgggcacccccagcggctccgacagcgcagtgaacacggtatacaggctttcatcccgaacctggtgaagctcggccccagccagcgcacttaccagccacagcccggcaaaccacagccaacggtggaaccggaggcggggcatcgttaaaagggattcggcgtgcaccgtgagggttcctgggcagtctggcgttgagaaagcggcaatactgaaagcccgcccggtttcaatcttgatggaaagttgacggccagtcgggcctcaccgcccgtggcatgtgccttgctatgaactctgcatcagagcacgcgccaacggcggagcgcgctacggacaaaggcgtcgttacccgcattggcttacatcgccatctgagggaacgacgctttttttttgaaagaaaaggtaggtgttgatgaacgattcggtcggcaacagcccgatgaacgacccgctggcctgggtcaacggcagtgatgccccggaaaagagcagccttgacctgggtttcatggccctgagcgactgcgcctcgatggtcgtagcggccacccagggcttcgctcaaccctacggcctgaccctgaacctcaagcgccaatcgtcctgggccaacctgcgcgacaaactggtcagcggcgaactggacgccgcccacagcctgtacgggctgatctatgccgtgcacctgggcatcggcggtgtcgcgcccaccgacatggccgtgctgatggggctcaaccagaacggccagagcatcaacctgtcccacggtttgcagcaacaaggggtggtcactcctgaggcactggaccgccacgtgcaccaaagccgaacaaaactgaccttcgcccagacctttcccacaggtactcacgccatgtggctctattactggctggcgagccaaggtattcaccctttgcaggatgtggacagcgtggtggtcccgccgccgcaaatggttgcgcacctgcaagccggacgcatcgacgggttttgtgtcggtgagccctggtgcgccagcgcggtcaagcagaaccaagggtttaccctggcgaccagccaggcgatctggccggatcacccggaaaaagtcctcggctgcacccgtgcgtttgtcgaccagtaccccaataccgcgcgcgtgctggtgatggcgatcctggaggccagccggtttatcgaagaaagcaccgaaaaccgccgctccaccgcgcaattgctcagtggtcgcgagtacctcgacgctccgctcgactgcatcgaaccgcgcctgctgggagcctatgacgatggcctgggcaatcaatggcaggacccccacgccctgcgttttttcgctgatggtgcggtgaacctgccctacttgtccgacggcatgtggttcatgacccagttccggcgttggggcctgttgcgcgaggaccccgactacctcggcgttgcccgccaggtgcagcaactggcgctgtatcgccaggcggcaggtgcgctggggatcccggtgaaaacccaggacatgcgcagcagccaactgatcgacggcaaagtctgggacggttccaaccccaccgagtatgcccgcagcttccgcctgcatgccctggccgatgattccaaccgccaggccttgcgctgacaggagaacctccatgctgcgaatcctgttgatcaatgatactccacgcaaggtcggccgcctcaggacggcgctgatcgaggccggctttgacgtcatcgatgagtcaggcctgaccatcgacctgcccgcacgcgtcgaaacggtgcgcccggacgtgatcctgatcgataccgagtcaccgggccgtgatgtgatggagcaggtggtattggtcagtcgtgaccaaccccggcccatcgtgatgtttaccgacgaacatgacccgaacgtaatgcgccaggcgatcaagtccggcgtcagtgcctacatcgtcgaaggcatccaggcccagcgcctgcagccgatcctcgatgtggccatggcgcgcttcgaaagtgaccaggccttgcgcgcccagctccaggcacgtgaccagcagttggccgagcgtaagcgcatcgagctggccaagggcatgctgatgaaaatgaaggcctgcaacgaagaagaggcctacaccctgatgcgccgccaggccatgagccgccagcaaaagctgatccaggtggcggagcagattatcgccatgagcgagctgctcggctgatctggctcagctcttgctaagtattgcgcacaggtagccaacggcggttgcccctccccgacaaagacgtcgcacacccggtttgccttcgcaaacccggtggcggcgttttttcgttttggccttcttacaagactcccaaccgttgaggtgcgtgatgaaatcaagcttctggaaatccgggcacaccccgaccctgtttgccgcgttcctgtatttcgacctgagcttcatggtctggtacctgctggggccactggcggtgcagattgccgccgacctgcacctgaccacccaacaacgcggcctggtggtggctacaccgatcctggcgggtgcggtgctgcgtttcctgatgggcatgctggcggacaagctgtcgcccaagaccgccgggctgattggccaagtgattgtgatctgtgccctgttcggcgcctggaagctgggcatccacagttacgaacaagcgctgctgctggggctgttcctgggcatggccggtgcatcctttgctgttgcgttgccactggcctcccagtggtatccggcggaacaccaaggcaaagccatggggatcgcgggtgcgggcaactccggcacggtgttcgccgcgttgctggcgcctgtgttggcggccgcctttggctggagcaatgtgttcggcttcgctttgattccgctggtactgacgctgatcgtgtttgcctggctggcgcgcaatgcccctgaacggccaaaagccaaatccatggccgactacttcaaggccctgggcgaccgtgacagctggtggttcatgtttttctacagcgtgaccttcggcggctttatcggcctggcgagtgccctgcccggttacttcaacgaccagtacggcctgagcccggtgaccgccggctactacaccgcggcctgcgtgttcggcggcagcctgatgcgcccactgggcggcgcgctggcggaccgtttcggcgggattcgtacgttgctgggcatgtacagcgtggcggcgatctgcatcgcggcggtgggtttcaacctgccaagctcttatgcggcgctggccctgttcgtctgcaccatgcttggcctgggcgccggtaacggcgcggtgttccaactggtgccgcagcgtttccgccgtgagatcggcgtgatgaccggcctgatcggcatggccggcggcattggcggttttgccctggcggccggtatgggggcgatcaagcaaagcaccggcagctatcagatggcgctgtggctgttcgccagcctgggcgtattggcctggttcggcctgcatggcgtgaaacgtcgctggagaaccacctggggctcggccgccgtgacggcagcgcgggtctgatgagcctgcaactgagcatcgcccaggccaatgccatcggccctcggacggaaaaccaggacgcgctgcgggtggtgacccccgtggccgaactggcagcgagcaaaggctacttgtgcgccatcgccgatggtgtgagccagtgcgccgacggcggcctggccgcccgctcgaccttgcaggcgctggccctggattactacgccacgccgcagacctggagcgtggcccaggctctggagcgtttgctgctggcccagaatcgctggctgcaggccaatggcggtggccagccgttgctgaccaccctgagtgccctggtgtttcgcggccagcgcttcaccctggcgcatgtcggcgattgccgggcgtatcgctggctggatggggaactgcaacgcatcagtgaggatcacgtgtgggagcagccgggcatgcagcatgtactcaagcgtgccctcggcctggatcaacacctggtggtagattttctcgacggccagttgcgcgaaggcgaatgtttcctcctgctcagtgacggtgtgtgggcaaccctgggcgatcacagcatccgttcgattctgcgcgagcaaaccgacctggagctggcagtcaacaccctggtgaacgccgcgcacctggcgggcagccaggacaatgccagtgccctgctcgtccgcgtcgacgcccttggcgcagccaccctcggcgatgccctggtgcagttgcagcagtggccgctgccacccccgctgaaagccgggcaacactttgaaggctggcaggtgcaaagcgtattggcgcaaagccggcagtcattgttgtaccgggtgtgggatgcccagcagcaaccctggctgctgaaaaccctgccgctgagccgcgatgatgacggcgatgccggccaggccttgctcgcggaagaatggtttctacggcgagtcgccggccgggcgtttcctgaagtccatgccgccagcgggcgccagcatctgtactacgtgatgcgggaataccccggccagaccctggccgaactgttccagcagcacggaccattacccctggcgcaatggcagtcgatcgccgagcgcttgctgcgggcggtgggcatgttgcaccggcgacagatcttgcaccgcgatatcaagccggaaaacctgctgctgggggatgatggcgaactgcgtgtgctggatttcggcctggcgtactgcccaggcctgtcggaagaccgcgctcatgcgctgccgggcacgccaagctttatcgcgcccgaggcgttccatggcgaccgccctacggcccagcaggatttatatagtgtcggtgtcagcctctattacctgctgaccgggcactacccctacggtgaaatcgaagccttccaacggcccaggttcaaccagcccgtcagcgccagtcgctaccgccccgatctgccggattggctgcccctgagcctggaacgcgcagtggcggcccaaccggcgcatcgttacgaaactgccgaagaatggttgcgagtgctggaacaggcggaccgacaggaactgagcatccgccccaagcccttgctggagcgtgaacccttgaaggtctggcgcactctggcgctgctttcgttgttgatcaacctggtgctgttgtacgcactctttcaccgctgacgtcatccctggacgaggaacaatttatgaacgcaaaagtctggctggtgggcgcaggccccggtgacccggagctgttgaccctcaaggcggtacgcgccttgcgtgaggccgatgtggtgctgatcgatgacctggccaaccaggcagtactggaacactgcgtcggagcacgggtgatcaccgtgggcaaacgcggtggctgtcgctcgaccccgcaggactttatccatcgcctgatgctgcgctatgcacgccagggcaaatgcgtggtgcggctcaagggcggcgacccgtgtattttcgggcgtggcggtgaggaagccatgtggctgcgtgaaaggggcgtggaggtagagttggtcaacgggatcacggcggggctggcgggcgcgacaaattgtgcggttccgctgacgctgcgcggggtgagtcgtggcgtgaccctggtgacggcgcatacccaggacgacagccgcctgaattggcgagcactggccgagggcgggacaacgctggtggtgtacatgggcgtggcgaagctggaggagattcgccagcaactgctggacggcgggatggcggcggatatgccggtggcgatgatcgaaaacgcatcgctgcctcagcaacgggaatgccgcagtgaactgtcacgaatgtatgcagatgcgcaggcatttgccttgaaaagcccggccatcctggtaattggccatgtcgcagccccaggacaagtcgcttgcctcgctcaagccgccagcgcctgagacaaattacaggcgaaaaaaaagcccggcctgagccgggcttttttctaccactcagtaattactgagcttgagcttcaaccgacgcttctacgcgacggttaacagcacgaccagcttcagttgcgttgtcagcaactgggcgggattcgccgtaacctactgcggtgatacggctaggagcaacgccgtctttaaccaggacttgcttaacagcgtcagcacgacgctgggacagcttctggttgtaagcgtctggacctacggagtcagtgtgaccagcaacttctacgttggtagctgggtactgagccatgaagtcggccaggtttttcacgtcgccgtagctgttaggcttaacaaccgacttgtcgaagtcgaacttaacgtccagctcaacacgtacaacctgagcaactggagcttctggctctggagttggctctggagctggtgctggggtaggagctggagcagctgcgccagcgttaccgccgaagttcacgcccaggccgaccagtgcggagtagtcccacttgccgttgtccagaccgtagtcagcttcaacaccggcacgagcgtacaggttgttggtgaagtagtacttcacgccagtaccaacggtagcgaaggtagtctggtcgcgaccgctgtggccgtcagcctgaacgttggtacggctctggtggccgaaaccgccttctacgtatggacgcaggctgtctacgccagcttgaccgaagtgatactgggcaaccaggctgccggtatcgcctttgatcttctggttaccagtaccgtcgttcgaacgggtgtggttggtcttgtcgtaggacaggttcaaggacaggtcgtcggtcaggaagtaaccgatgcgagcgccaggattgaagccgtcttcgatgtgcttgacgctatcgttgtactgcttcttgtagaacagctcgccttcaactgcgccttggccttgtgccagaacgccgaaagaagtagcggcaataagagaaccaatggccaagcccaaggtgtttttcagtttcatccgttaaatccccatctggtgattgtaaagcagtcccacaaaccgggggacaactcggcgacaagtctaacagaacttgcctacacgtaagagatatttgccacgcactaagtttcagtctcgcccgcaaatttctcacgtaatttatcaagagcacgtttgtaacgcatttttgtagcactcaaacccatgtgcatgatgtcagcgatttcctggaattccagctctgcgacaaatcgtagcaccagaatttcccggtcaatcgggttcacatacaccaaccagcggtcaagtccgcccttctcctcgggtgccggcgccttttcttcagacgcctcctcaagggggtcaagactcaacgcgtccatcaagcgacgcttgcgccgttccttccgatactgcgtgatgcactcgttgtacgtgatgctgtacagccatgtcttgaacttcgatttgccctcgaagttcttcagcccgtacagcaccttgagcatcacttcctgacagacatcgtccgcatctctatcgttccctaaataccttgaacaaacgttgaacagagtgcgttgatatctgcgcatcaattcttcgtacgcgcgagttacgtgaaacagctccgtgtgcgagcgcgcgaccaactcctcatcagagagctcacgggggtcatagcgcgtggacagcgtttgggctttattcaaaacaagtcgtgccgacagtcaggtcaatgtccgccacagcccgatcagccgggttcgcggcggcgtacattagcagggtttgccgggttagcggctactgacctgctgttccaggagaatccgattggacaacgacaccagatcgccgtcatcggtcagcaccgtcgtcttgactgtgccgatctcctcgatttgcccttcgacctcgcccacacgcacctgttgccctacctgatacagctcacgcacatagattcccgcaagaatctggccggcaatttcccggcttcccaagcccatggccagcgcaacggccagaccaacggtaatcaaaacgatcacaatcacatggttgagcaggtcagtcttgacctccaactggctgatcgcgaccgaaatactgatgatgatcaccaggccctgggcaattcgccccaggccggcagcatagtccaaccccacgccttcggcggcgccgcgcaccagcccattggccagttgcgccagcaaaacgcctaccagcagcaccagcgcgccgccgaaaaccttcggcaaatacagcgccagcatgtcgagcgtagctgaaactcgctcaagtccaagggattgagccgcagaaaccaggaaaatcagcaaaacaaaccaataaacgatcttgccgatcaatgtcgagatcggcacttgcagcccggcacgtcccaacagcttggtcaggccggtgcccgccatcaggcggtcgaggcccagtttcgcgagcagtttggacagcagggtgtcgagcagcttggccacgacaaagcccagcagcaccagcaccaaggcaccaaacaggttgggaatgaaattcgccaccttggtccacaatgcggtcatcgcggtgaccaggctctgggtccagagatcaagttccatattcaatcagccttatcagcagtgcgagcaagaggtttacgacgggaaaccggtgagacatgggccgaaccgttgttcagggccatcatcaacgccggcacccagcgcccgagcagaccgaacagatcacccgcgcctacctgacggttggcggttttcagcacgcggcccaggcaggcatcgtcgtcccggttggacggcgaagcattgagcatgtcacgcaaagactgttcgaacggatcgtgcataaggacctctcgcaagtgatttaaaagacgagggttaaattcttggggtcacataggacccttcctacgttcagctcatattcaggtcaaacccagcgtaatcgtcgaaaaagccaccattgtccaagcgccaccgagaccatcaacaggcacgcaatcatgaatccataggggctggcagagaacggaatcccgcccacattgatacccagcaagccggtgagaaaactcatcggcaggaagatcccggtgatgatcccgaagcggtacatggtgcggttcatacgcacgctcaaacgccggtcttcggcctccagcacaagccccacgcgctctcgggtcaattcgagctcttccagataacgggtgaggctgttgttcaattcgttccaatagtcggcatcgtcgtcacagaaccacggcaatttgatgcgcgtgagctgggcaaaaatatcccgctgcggcgccaggaatcgcttgagcccggccgcccgtcgacggatctgcaaaacgctgccatgttccggggtataccgttcgtcggtatcgagtttttcttcctctatgtcgacgatttcggacaggtcggagaccagatcctgcactttattggtgaggtactgagccatataaaggatgagttcagaggcggtcttcggccccttgccgtccgccaattgcaccagcagttcgtcggtggcgcgcaacgggcgcaaccgcagggaaatcacccggctggccgcagcaaagatgcgcaccgagaccatgtcctccggttcagcaccggggttgaggttgacccctcgcaagaacagcagcaattgcgagtccggcagcggcaacaggcgcgggcgggtgttctcctccagcaacaggtcacaggcgaactcgctcaggccactggatttgcgcagccaggtctgggtttgcggatgactgcgatcccaatgcagccacaggctttcctggggctgcagttgcaagtcgtcgagctctgtccgtgcaatcgaacgcgcaccgcctttaccgtccagcaccagggcatgcaccaggccccactgcgcgttttcttcctcgaacatcctcaccccgtcggttattgcagtttattcaggcattttcagcgggctgggcgacacgatcacgccgttgttgtcggcatagatgtactcgcccggacggaacgtcaccccggcaaaggtgaccaccacgttcaagtcgccgatgccacgcttgtcggtcttcatcgggtggctggccagggcctgcacgcccaggtcggtctgggcaatgacgtcgacatcgcggatgcagccgtagatcaccagcccttcccagccgtttctcgcggccttctcggcgatcatgtcacccagcagcgcacggcgcagggaaccgccaccgtcaaccaccagcaccttgccggcgccaggctggtctgcctgttccttgaccagagagttatcttcgaagcatttgatggtgacaatctcgccaccgaaggaatctcggccgccgaagttgctgaacatcggctcaagcacctgcaccagctccgggtacgcgtcgcacaggtcgggggtcacgtaatggttcattgaacaattcctttccgtcaaagaagcgtctttcaaaagaagcgccagcccaagcaggtgcgaaacatcccatccacttcgccgcaacgcaatagccactgcgcgactgaatatgaccagaagcgtttaacgcgtcatatcttagccgcaaccacacacgagtgaaacgcccttggcagagccctgccctcaacccgtggccagcacctcgggctgcacgccgaacaagggtgtgagcgggtcgttcagccattgcaccaccagcggccacacttcggcctgggcagctttgctgacgagcatttcaacgtgcccgaaatcttcggtaaacccttgctggcggcccaggcacaggtattgacggtgctcggagccgacctgctcgaacagcttgcgacacgcccagtcagggtcctgatggtcgccggcggcactgaccgccaacaacggcacatccacgtctgccaggcctttccaccagtcgttcttgccttcgccaaagcggccaaacaggccgttccagcgcatggcttcgatcatcacacctgccggctcgtcctccgggccacgcttgaggcgcgagccagacacttcgccgaagcgtttcaagagcaagcgccccgtccactccaccggtggcagtttcaacggccagtgggtgcggctgacctggcagccaaacaacgctacagaagccacggctggcgcgccaaggtgcttcccgccaagcgctgcagccaggctggtgccgcccagggaatggccgatccagtggggaacctgcccgctttgctcgcgcacaaacgcgccaatggccggcaagtcgtagcgcgcatagtcagcgacgcggttgcgtgcgtagtcatgattgcgcttggacaaaccatgaccacgcatttccgggatccacacatcaaacccctgacgggccaggtaagcccccaggccgatgcctttgggcgaataccagaagcgccgattggaaaaactgccatgcaataaaataaccgcaatgccccggttttccgggacatcggccaggcccagacgggtaaccgccagctcgacggtgccgtcggggctgttaccgggtttgaggcggtaaacatcttcactcaggtcgccacgacgttcagcgctgatcagggcgacgggaaacagtttgctgctgctttgcataatgctcttgcacaaaaaagggcggcgtccggaaggagttccgccctgcacagataagaatgccggtcacccttatcgggtgaccggcacttttgacatgacgatcttaggcggacgcttggccttccgccaggaagaaccaggtttccagcacggaatcggggttcaacgagacactttcgatgccctgttccatcagccatttggccaggtcaggatggtcggaagggccttggccgcagatgccgatgtacttgccggccttgttacaggcctggatggcattggccagcagcttcttgaccgcagggtttcgctcgtcgaacaggtgggcgatgatcccggaatcgcggtccaggcccagggtcagctgggtcaggtcgttggagccgatggagaaaccgtcgaagaactccaggaactcttcggccaggatggcgttggacggcaattcgcacatcatgatcacgcgcaggccgttttcgccacgggacaggccgttttccgccagcaagtccaccacctggctcgcttcgcccagggtgcgcacgaacggcaccatgatctcgacgttggtcaggcccatctcgttgcgcacgcgtttgagggcgcggcattcgagttcgaagcaatcacggaacgcttcgctgatgtaacgcgaggcgccacggaagcccaacatcgggttttcttcttccggctcgtagagcttgccaccgatcaggttggcgtattcgttggacttgaagtccgacagacgcacgatgacctttttcgggtagaacgccgccgccagggtgctgatgccttccactagcttctcgacatagaagcccaccgggtcgttgtagccggcgatgcgcttgtcgacgctttccttgatgtccagcggcaggccgtcatagttcaacagggccttggggtgcacgccgatcatgcggttgatgatgaactccagccgggccaggcccacaccggcattcggcaattgcgcgaagtcgaaggcacggtcagggttgccgacgttcatcatgatcttgaacggcaggtccggcatggcgtcgatggagttctgcttgatgtcgaagcccagttcaccttcgaagatgaaaccggtgtcgccttcggcgcaggacacggtcacgccctggccgtccttgagcagttgggtggcgttgccgcaaccgactaccgcagggatccccagttcacgggcgatgatcgccgcgtggcaggtacgcccgccacggttggtgacgatggcgctggcgcgtttcatcaccggttcccagtccgggtcggtcatgtcggagaccagtacgtcacctggctggaccttgtccatctcggacacgtccttgatgatccgcaccttgccggcgccgatgcgctggccgatggcacggccttccaccagcacggtgccggtttctttgagcaggtagcgctccatgacattggccgacgtgcggcttttcacggtttccggacgggcttgcacgatgtacaacttgccgtcgtcaccgtccttggcccactcgatgtccatcgggcacttgtagtgcttttcgatgatcatcgcttgcttggccaactcgctgacttcagcgtcggtcaggcagaaacgcgcgcgttcggccttgtcgacttcaacggttttcaccgaacgaccggccttggcctcgtcgccgtagatcatcttgatagccttgctgcccaggttacggcgcaggatggccgggcggcccgcttcaagggtgcccttgtgtacgtagaattcgtcgggattgaccgcgccctgtacgacggtttcacccaggccgtaggcgccggtgatgaacaccacgtcacggaagcccgattcggtatcgagggtgaacatcacgccggcagtgccggtttccgaacgcaccatgcgctgcacaccggcagacaaggccaccagcttgtggtcgaaaccctggtgcacacggtaggaaatcgcgcgatcgttgaacagcgaggcgaacacttccttggctgcgcggatgacgttttccacgccgcgaatattcaggaaggtctcttgctggccggcgaaggaggcgtccggcaggtcttcggcggtggccgaggagcgcacggcgacggccatgtccgggttgccggccgacagggtggcgaaggcggtacggatctcttcgttgagcttctcggggaactcggcttccatgatccattggcggatctgggcgccggtcttggccagggcattgacgtcatcgacgtccagggcgtccagcgcggcgtggatctgagcgttgaggccgctcagttcgaggaaatcgcggtaagcctgggccgtggtggcgaaaccaccgggcaccgacacacctgcgcctgcaagattactgatcatctcgccgagggatgcgttcttgccccccacgtgctctacatcatggacgccgagcttatcgagggaaactacgtactctaccaaggtgatctctccactttctgtgttggaaaagctcaggacgccggctgctcagtaggagcattcgccagcgcttgtggcctggacctggaaaataagtgagaatgcggcccactgcgggacggcaaaatcgcgcctatcatatccaagattcgccatcagcttaaggcccagggctcaaatgaaacgatctgctttctttatctccgacggcaccggcatcacagccgaaacactgggtcaaagcctgctcgcgcagttcgaaaacattaccttcgccaaattcacgcggccgtacatcgacagcgtggataaagcgcgggccatggtacaacaaatcaatctggcggctgaaaaagacgggttccgcccgatcattttcgacaccatcgtcaatcaagacatccgtgagattctcgcaacgtcgaatggtttcatgatcgatattttctcgaccttcctggcgccattggagcaggagttgagtgaacactcctcctattcggtcggaaagtcccattccattgggcacaactccaactatatggagcgtatcgaggcggtgaacttcgccctcgacaacgacgacggcgcccgtacgcactactatgacaaggccgacctgatcctggtcggcgtgtcgcgctgcggcaaaacgcccacctgcctgtacatggccatgcagttcgggattcgcgcggccaattacccgctgaccgaagacgacatggagcacctgacgctgccggcggccctgcgcgcgcattcgcacaagctgttcgggctgaccatcgatccggaccgcctcaccgcaatccgcaatgagcgcaagcccaacagtcgctattcgagctatgcccagtgtgagtttgaagtgcgcgaagtagaaaatctgttccgccgggagaatattgcgcacatcaattccacgcatttctcggtggaagagatttccgcgaagattctggtggagaaaggcgtggagcgcaggttcaagtaagggtggcgcctggactggcctcttcgcgggcaagcccgctcccacagttgaccgagttccagctctggaatgcggtcaaaatgtgggagctggcttgcctgcgaagaacgataacgcggtgaacctgcctacagctgaaaccttcctcccccctgccccagcgccgtggccagcgcatcaaaccccgcccgcaacagctgatcatcccccgaggtgttgcagatactcgcccggatgaactgcggcaccgccgtctgccccacggcaaacgcctcggcggtggcgatcaggtaattattctgcttgagctcggcctcgatctccgacgcccgccatggctccggcacttctatccagaagtgcgggctgttgagatgggtgcggtattccaggcccgccagcaggtcgcggaccagcgccttgcggcggctgatctcgttgatctgctggcgcagcaggtattccgccgtgccgttctcgatccactgggtcgccagctcgagggtgacgggcgtggccatccagcaggtcgaacgcagggccgccgaaatacggctgaccagtgcgggcggcgcatgcacatagcccacacgcagcccggcggacaccgccttgctcaggctgctgatcaaaatcgtacgctcaggggcgaaatggctgaggggcggcggccgatcctccaccagtacaccgtgggcttcgtcctcaagaatcagcagattgtgttcgcgacagactttgaccaacgcttcgcgacgcgccaccgagagcacagcggtggtggggttctggatggtgggcgtgcagtacagcgctgaaatccggtgattacgacagacttcgtcaagcgcgctcggcagcacgccttcttcgtccatctccagaccgatcagccggatacccagcatgcgcgcggcggtgatcaggccgggataagtcagctgttcagtgaccaccgtatcgccagcccgcaacagtgccatcatcgagcagagcaagccgtgctggccgccgttgacgcagatgacctgctcggggatcggatgaaaatcgcgctgcaccagccattgcgcaccggcttcacggtagcgcggcaagccggcgtctggcgtgtaggcactgatgtcctggaggaacttggcgttggtcgacagggtttggaagctctgggccaggaacaccgtctcctgccccgggatgtgcatattccggctcatgtcgaagtattggcgcggttcttcgctgaagttgcgaaagccttcatcgcgctggcgctccatcccacgcttgcgcacgaaggtaccgtcccccacccgcgccaccaccaggcccaggcgttccagttcgccgtaggcacggctgatggtgccgatcgtgacgccaagattgtcggaaagtacccgatggggcggcagttttcttcctggctcaatcaagccttcaaggatgccccgttccatgacatcggacagtcgcttgtacttcacgccctgaccgttggacaacccctcacgcataattgacaccatgtcaatatttgttttgacagccatctttcgccctaatagtgtgcttttacgggttcaatcgccgaattttacaactcattacaagctcaatatagagttcaattccggctcagggaagcaataaacgatgccaatgtccgccgttctcgaaaacaccgccaagaccaaaacccaaaaacagtggctggccgggctgatcaccagtgtgatgttcctgatcgtgtgcctgagttggggcaccacctggctgggtatcaagattgccgtggagagcgtgccgccgctgacctccgccggcctgcgcttcctcatcgccttcccgctgttcctgtgttttgccatggtgcgccgcgaaccgatcctgtttccccgcgagagtcgctggttcttcgtgttcgtgaccctgtcctacttcagcgtgccctactacctgctcaactacggcgagatgcatgtctcgtccggcctcaccgcgctgctgttcagttgcatgccggtgttcatcctgattttctccgcgctgttcctgcgcgaacgcatctacttttcccaggtggtcggtatcggtatcggcttcggcagcctctacatgatcatcaagagccagggcctgcacctggaccacgccgagttcttcggggtactggcgattctgaccgccgcgatcatgcatgccttgtgctacgtcatcaccaagcagaaaggcagcgccatcagcgtaatcacctacaacaccctgcccatcggtattgccgggctgatgctgttcgtcgccgggctgtggtttgaagcgccgaccttcgaagccatcaccctacggtcgtggggtgcgctgttctacctggggctggtggcctcggtgggtgggttcatcgtgtatttcatgctgctcaagcgcttgagcccgatcatcctgtcgttcgtgtttatcatcttcccggtgttcgcggtgatcatcggcgcctggtacgaaggcgtgtcgatttcccgcgacctgatgctctactcggccatcctgctggccggctttgcgatcaccaagttgccggttgaaaaactcttggccaagaaaaattgaccctcctaccaccacgcgagagaaacatggacgtcctccgccccgaagccctggaacagatctacgcccacgccagccgcagctaccccgaggagtgctgtggttttgtcttcgccgacggcagcgtgtacctgggcagcaatatccagaacgagctgcaccgcaagaaccccgagatgtacccgcgcagcgccgccaacggctacacattctcggtggccgacaccctgctgctgagcaaggcgtttcgcagcgacaacccggtggtggtgatctatcactcccacccggatgtcggcgcctatttcagcgacgaagacgaggacaaggcgctgttcatgggtgaaccgatctaccccgtcagctacctggtggtcgacgttcgccagggccaggccctcggttccaagctgtttgcctgggatggcaagcatttcgcccttcaacctttcaacgacctgcacacggagttgtccatgaacgctgtctctttccccgacattctggttcgcgtggccaagctgccggaatcgaccctcgagggcgccggaacgacattgcgcgaagtcattgaaaacctctgcagcagccacccgcagttacgtccccacctgttccacgagaagaacaaccagctcaaggaacacttcctgtttaccgccgaggaagagttagtgggcgccgacgacccactaccggaaaaagcccggatcgaagtgctgctcgccacgtcgggcggcatggatgtcgacgcactgagcaatgaagaagtccagcgctacgtgcgccacatcaccctgcccggcgtcggccgcgaaggccagttgaacctcaagaaagccaaggtgctgatcatcggcaccggtggcctgggctcaccgatcagcctgtacctggcagcagccggcgtcggcaccctggggctggtggacttcgatgtggtggaaagcagcaacctgcaacgccagatcgtccacggcaacagcacgctgggcatgcccaaggtcgagtccgccaagcaacgtctgcaagaactcaaccgtcatatccagatcaatgcccacgacaccgccctgaatgccgataacgccctggaactggtgggcgcatacgacctggtgatcgacggcaccgacaatttcgacacccgctacctggtcaacgacgcctgcgtgcagctgggcaagccgttggtatacggcgccatctaccgcttcgacgggcagatcagcgtgctcaactataaaggtgggccctgctaccgctgcctgttccccagcgcgccgcccgccgaactggcgcccaattgcagcgccggtggcgtgatcggcgtgttgcccggtgtggtcgggatgatccaggccaccgaggccatcaagctgttgatcggcattggcgaaccgctgtctggccgcttgatgcgcttcgatgcgctggcgatgaagttcagcgagatccgcttcaagcgccgtgccgactgcccgtgctgctccgaactgcgccataacgaaagcgtggcaccggctgtctgtgcagacgccatgcccagccgaccgtccctggccgaggagcgctacataaagccccgtgtactcaagcaattgctcgaacacccgcgcagcgtcgatgtgttgctggacgtgcgtgatgccagcgaactggaggtatgcaaattgccaggtgtggtgcatatccccctggccgaactggacgatcagctcgaccgcctcagccgggacaacacccactacctgatctgctacgccggcacccgcgccgagcaagccgccagtaccttgctggcggcgggtttcgccaataccaaagtcctgcagggcggcatgaagcattgggttcgcgacgtcgaacccgacatgcccttgtattgagccgaggactgaatgatgttgcacaactcgattctcgaggtgatcggccaaacgccgatcgtgcgcctggcgcagttctccgaagacctcggcatcgaggtctacgccaagctcgaatccctcaacccgggcggcagccacaaggcgcgcatcgccctgggcatgatcctcgacgccgaacgccggggcgtgctgatccgtgactccgggcaaaccatcatcgagcccagcggcggcaataccggtatcggcctggtcatggccggcaatgtgctgggctacaaggtcgtgctggtgatccccgacaactacagccccgaaaaacagaagctgctgcgcctgtacggggccaaggtggtgctgtcggacagccgcctgggcaacaactcccacggcgaaaagtgcatggaattgcagctggaaaaccccagctacgtgatgctcaaccagcaacgcaacggcgccaacccacagacccatcgcgacaccaccgcaccggaaatcctgcgtgcgttcggcgagcgtcgcgccgactactttgtcagcggaatcggcaccggtgggcatatcaccgggattggcgaaaccttgaaagccgcctggccggggctgcgcgtcatgggggtggagccggaagaatgcgacctgctgaaaaaccagcatgcgccgcaccatatccagggcctgtcgatcggcctgatcccgagcatcctcaacctggacgtgatcgacggcatgctcaaggtctcgcgccaggactgcatcgacatgatgaaacgcatcatgcgcacggatgccatcagcctgggcttgtcttcggctgccaacatggtggccgtcgcccaactcgccccggaactgccgcccgaaacggtggtgctgaccatggtctacgacaatgccgacagctacctgcccagtttcgaataaacggtcttccaaccaatcagacgacgggggtgcctcaatgggtggctttatcgacatgcaacagttgcacgatgagttgctgactcacctcatcaagacgctcacgccggcacagatgaaacagctggagccgcatctggcgccgctggtacagaatgccgcccaggcggtggccgaggatttgatcgcctacgcctaccgcgacccggcatcccgtgggcgcggtgagctgatcctggagtcctacgcgtcgttcaaggcggtgctgtattaccggctggcgcacctggtgtggcatttccccgaccgcaccaacggcgtcttctcgcgtatcgccctcaagctgagcaaccagggcaaggtgctttccggcgccgagatccacccggcggcgcgcattggtcggcgctttgtactggatcacggctacggcaccgtgatcggcgaaacgtgtgagatcggcaacgactgctacatcctctgcggcgtgaccctgggcgcccgtggcatcgccaacaaccccgacggcaagcgccacccacgcctgggcaataacgtcgaggttggttccggcgcccgcgtgctcggctatgtactgatcggcgacaacgtgtttatcagtccctcctgtgtgatcacccaggatgtgcccgccggcaccaaagtgaaggtggtgaaccagatccaactgcaaaaaaacgacgagtcggaccacagcaattacctcggcgccttcgccctggatgagcgtctgcacgtggtcggcgagatcaatgcgagccacaaggtcacggtgctggacgccgacttccatcccttgcccgggctgatgctggagcccacggtgaaggagcgtcaccacctgcaatttcgcctgcaccgcatcgagtcgggcaaccccctgccacgcctgccgctgaacctgaaggtctgcggcccggaatttgaaatcaccctgctttccccgcctggcttgagtgcgatggtgcgttccctgttgcaagccagtccattgatcgttggaggttgaacatgtccgtgcacaccatggaaaccctggcgctgttcgacagcgcgccctaccagaacgccttcagcgcccgggtgattgccgtcagcgaacacggcgtcgccctggaacacacgttgttctaccccaccgggggcgggcagccaggcgacacggggcacctcaccctggcggacggtacgcgggtcgaagtgaccggcacagtgcgcgacccggtgcagcgctcgatcatctggcaccaggtggaacactgccccgagcaattgaccgccggagtgcaggtggacgccggcctcgactgggaccggcgctaccagcacatgaagatgcacacctgcctgcacctgttgtgctcgatcatcgacgcgccggtcaccggatgcagcatcagcgcagacaaaggccgcctggatttcgacctgccggaaatgaccctcgacaaagacagcatcacccgcgacctcaatgcgctgatcgaacaggcccacccggtgaaaaccctgtcgatgccggccaccgagtacgccaccctgctgcagatcacccgcacccaggcggtggcaccgccggtgattcagggtgcggtgcgggtgattgaaatcgccggcatcgatatccaaccgtgcggcggcacccatgtgctcaacaccgaagaaatcagccgggtgttctgcgagaagatcgagaagaagagcaaacacaaccgcagagtcatactgcgattcgagtgaacacggtgaactgtgggagccccccctcccacattcattgggtttccacagataaatacagggtgtctgctagatcacgaaaagatcaacaaaccggtttaccggcgttgcctcaagccgcgcctgatctttgcacaacgcaaaaatctcggcgctgcgctgcgcggtaaaccgtgtgaccaggttggccttgaacttgtcttccaataacggaatgccatccacccggcgacggcgatggccgatcgggtactccaccgccacctgctcggtgctgctcccatccttgaagaacacctgcaccgcgttggcgatggaacgcttgtcagcctccaggtattcgcggctgtagcgtgggtcttcgacgatgaccattttgtcccgcagcgcgtcgatgatcggatgggcggcgtggaattcgtcttcgtactgctccgccaccagattgccgaacgccaacggcacggcggtcatgtattgcaggcaatggtcacggtccgcggcgttggccagttggccgaccttggaaatgatgcgaatcgccgactcatgggtggtgatcacgatacgttcgatttcctgcaggcgatccttgaccaatggatgcaaggtcaccgccgcttcgcaggctgtttgcgcgtggaactcggcggggaagctgatcttgaacagcacgttttccatcacataggtgccgtagggctgggacaggctgaacccgcgcttgtcctgcggcttgagcgccaggtccttgttggtgtggctgaacaatacgtcgtagaacccccactgcggtgcgcttaatacaccggggatgcccatttcgccgcgcatcgcgatatccgccaggcgcacaccccggctggaggcatcacccgccgcccaggatttgcgcgaaccggcattcggcgcatgccggtacgtacgcaacgcctgcccatcgacaaaggcgtgggacaaggccgcgagcagttgctcacggttggcgcccatcagcttggcggtcaccgccgtggaggcgacttttaccagcagcacatggtcgaggccgacacggttgaacgagttttccagggcaatcacgccttggatttcgtgggccatgatcatcgcttccagcaccgcgcgcagggtcagcggtgtgtcaccgttggccacgcgcttttgcgacaggtggtcggccacggcgagaatgccgccgaggttgtccgacgggtggccccactcggcggcgagccaggtatcgttgtagtcgagccaacgtacgatgcagccgatgtcccacgccgccttgaccggatccagccggaacgaagtgcccggtacacgagcgccgaacggcaccaccgtgccctcgaccaccggccccaggtgcttggtgcactccgggaaacgcagggccagcaggccgcagcccagcgtgtccatcaggcagttgcgggcggtgtccaatgcggcctgggaatcgatccggtaagtgaggacatagtcggcgatgtcctgcaggacctggtcgtactcgggacggttgttctggtcgacgttggcgctcatggcagtactccaaaaaggggttggggtcagtcctcgggctcacggttattgagggcagatctaaggtgtccgccttggaataaagatcacctgtgggagggggcttgcccccgatggcagtggatcggtggatgaatctgtcgactggaacaccgctatcgggggcaagccccctcccacattggatagaggaggacctttagaaagcatcgccggggatgcgtacgaagccttccatcagtactcgggcgctgcggctcatgatggctttttttaccacccattcgccctccacctgggtggcttcagcgccgacgcgcaaggtaccggacggatgcccgaagcgcaccgcgttgcgctcaataccgcccgccgccaagttgaccaacgtcccggaaatcgccgccgccgtgccgattgccaccgccgccgtgcccatcatcgcgtggtgcaacttgcccatggacagcgcacgcaccagcaggtccacatcacccgccttgatcgccttgccactggacgccacgtagtcggccggcttggccacaaacgccaccttcggcgtgtgttggcgttgggcggcttcgtccaggtgctggatcaggcccatgcgcaacgcgccataagcccgcacggtctcgaacattgccagggctttcgggtcgctgttgatcgcgccttgcaactcggtgccggtgtagccgaggtcttcggcgttgataaagatggtcgggataccggcgttgatcagcgttgccttgaaggtgccgacgccaggcacttccaggtcgtccaccaggttgccggtggggaacatcgacccgccgccgccctcttcatccgctgccgggtccatgaattccaactgcacttcggcagccggaaaggtcacgccgtcgagttcgaagtcaccggtttcctgcacggcgccgtcagtgatcggcacatgggcgatgatggtcttgccgatattggcctgccatacacgcaccacagccacgccgttgtgggggacgcgggccgggtcgaccaggccggcgctgatggcaaaggaaccgaccgccgccgacaggttgccgcagttgccgctccaatcaacgaagggtttgtcgatggagacctggccgaacaggtaatccacgtcatgatcggcgcgagtgcttttggccaggatcacggttttgctggtgctcgaggtggcgccgcccatgccgtcgatttgcttgtcgtaggggtcggggctgccgattacccgtaacagcaaggcgtcacgcgcagcccccggcacctgcgccggttcgggcaggtccgtgaggctgaaaaacacacccttgctggtgccgccacgcatgtaggtggcagggatcttgatttgcgctacgtgtgccatggtgtcctctcaggctgtcgccgccgattccaggaagtcctgggcaaaacgctgcaacacgccgcccgcctcgtagatcgacacttcttcggcggtgtcgaggcggcaggtcaccggtacctcgacacgttcgccattcttgcggttgatcaccagggtcaactgcgcgcgtggagtgcgagcaccgaccacgtcataggtctcgctgccatcgatcttcagggtgtggcggtcggtgcccggcaggaactccagcggcagcacgcccatgcccaccaggttggtgcgatggatgcgctcgaacccttcggcggcaatcgcctccacaccggccaggcgcacgcccttggccgcccagtcgcgggacgagccctggccgtagtcggcgccggcaatgatgatcagcggctgcttacgctccatgtaggtctcgatggcttcccacatccgcgtgacctggccttccggctcgatgcgcgccagggaaccctgcttgaccttgccgttttccaccaccatttcgttgaacagtttcgggttggcgaaggttgcgcgctgcgcggtcaagtggtcgccacggtgggtcgcgtaggagttgaagtcgacttccggcaggcccattttcgccaggtattcgccggcggcgctgtcgagcatgatcgcgttggacggcgacaagtggtcggtggtgatgttgtccggcagcaccgccaatgggcgcatgcccttgagcggacgcgccccggccagcgcaccttcccagtacggcgggcgacggatataggtgctctgcgggcgccagtcgtacagcggcgcgactttcgggccggtgtcttcgtggatggcgaacatcgggatgtagacctggcggaactgctccggcttgaccgaggccttgaccactgcgtcgatctcttcgtcgctcggccagatgtcctgcaggcggatttccttgccgttggcgtcgaggccgagcacgtctttttcgatgtcgaagcggatggtgccggcaatcgcgtacgccaccaccagcggtggcgacgcgaggaatgcttgcttggcgtaggggtggattcgcccgtcgaagttgcggttgcccgacagcacagcggtggcgtacaggtcgcggtcgatgatttcctgctggatcaccgggtcgagtgcgccggacatgccgttgcaggtggtgcaggcaaacgccaccacaccgaaaccgagcttctccagctcatggcccaggcccgcttcttccaggtacatcgccacggttttcgagcccggcgccagggacgatttgacccacggcttgcgcgtcagacccaacttgttggcgttgcgcgccagcaggccggcggcgatcacgttgcgcgggttgctggtgttggtgcaactagtgatagcagcgatgatcaccgcgccgtcgggcatttgccccggcacttcatcccactggccggaaatacccttggacgccagatcgcgggtggcaacgcgagcatgcgggttgctcggcccggccatgttgcgcacgacgctggacagatcgaaggtcagcccacgctcgtactgcgcgcccttgaggtcatcggcccacagaccggtgtggcgagcatattgctccaccagggtgacttgctcgtcttcacggccggtgagtttcaggtaggcgatggtctgctggtcgatgtagaacatcgccgcggtcgcgccgtattccggggccatgttggagatggttgcacggtcgccaagggtcagtgccgaggcgccttcgccgaagaactccagccaggcgccgaccaccttctgttgacgcaggaactcggtcagcgccagcaccatgtcggtggcggtgatgccgggttgcagcttgcccgtcagttcaacgccgacgctttccggcaggcgcatccacgaggcgcgaccgagcatcacgctctcagcttccaggccgccgacaccgatggcgatcacgcccagggcatccacgtggggtgtgtggctgtcggtgccaacgcaggtatcggggaaagccacgccgtcgcgcacctggatcaccggggacattttctccaggttgatctggtgcatgatgccgttgccgggcgggatcacgtcgacgttcttgaaggccttcttggtccactcgatgaagtggaaacggtcttcgttgcgacggtcttcgatggcgcggtttttctcgaatgcgtccgggtcgaaaccgccggcttcgacggccagggagtggtcgacgatcagttgggtcggcaccaccgggttgacctgcgccgggtcaccgccttgcagggcgatggcatcacgcaggccggcgaggtcgaccagggcggtctggccgaggatgtcgtggcagacgacgcgggccgggaaccatgggaaatcgaggtcacgcttgcgttcgatcaactggctcagggatgcattgagggtggccgggtcacaacggcgcacgaggttttccgcaagcacgcgggaggtgtacggcaaggtggcgtaggcaccgggggtaattgcctcgacagccgcgcgggcgtcgaagaaatccaggcggctgccggggagcggtttgcgaaattcagtgttcatcgtcaggactcggtcacggtgataacaaagggaggacctgcaccgatccagaattgaaatgcggtcaaaatgtgggagggggcttgcccccgatagcggtgggtctgtgccagttgcatcaactgacagactgcaatcgggggcaagccccctcccacatttgatccggttaacatttcaggatcgtcggcattcccattcagcgacgttcgattggcacgaacttgcgctgctcaacgccggtgtattcggcgcttggacggatgatgcggttgttggcgcgctgttcgaacacatgcgccgcccagccagtcaggcgcgagcacacgaagatcggggtgaacagcttggtcgggatgcccatgaagtggtacgccgaggcatggtagaagtcggcgttggggaacagcttcttctgctcccacatggtcttgtcgatggcttcggagaccgggaacagcaccttgtcgcccacctcgtccgcaagttttttcgaccagcccttgatcacttcattacgcgggtcgctgtctttgtagatcgcgtggccgaagcccatgatcttgtccttgcgcgccagcatgccgagggtgccttcgaccgcttcttcagccgacgagaaacgctcgatcatctccatcgccgcctcgttggcgccgccgtgcagcgggccgcgcagcgagccgatggcggcggtgacgcaggaatacaggtcggacagggtcgaggcacacacccgggcggtgaacgtcgaggcgttgaattcgtgttccgcgtagaggatcagcgacacgttcatcaccttgacgtgcaactcgctgggcttcttgccgtgcagcaggtgcaggaagtggccgccgatgctcggctcgtcggtcacgcagtcgatgcgcttgccgtcgtggctgaagcggtaccagtagcacatgattgccgggaacgcggcgagcaggcggtcggtaacgtcgcgctgcacgctgaagtctttttccggctcgatattgcccaggaacgagcaaccggtgcgcatcacgtccatcgggtgggcgtcggcggggatacgctccaacacttccttcagcgcttgcggcaggtcgcgcagcttgcccagcctggcgctgtaggcggccagctcggtcttggtcggcaactcgccgtacagcagcaggtaggcgacttcttcaaattgcgcatcggcggccagttcgcgcacgtcgtagccgcgataggtcaggccggcacccgcctggcccacggtggacagtgcggtctgcccagccacctggccacgcaggccggccccactcaatacttttgcttcagccatgtctgttctccaatcttgaatttatttgggagtgcgccgggttattttttcgcggcaaacagcgcatcgagcttctgctcgaaggtgtggtagtcgatgcgatcgtaaagctccatgcgggtctgcatggtgtcgatcacgttctgttgggtaccgtcgcgacggatcgcggtgtagacattctcggcggccttgttcatggcgcggaaggccgagagcgggtacagcacgatggaaacatcggcagatttcaactgttcggtggtgtacagcggcgtggcgccgaactcggtgatgttggccaggatcggtgctttcacacgagaggcgaacagcttgtacatgtccagttcggtgatggcttccgggaagaccatgtcggcgccggcctcgatgcaggcggcggcacgttccagcgcggattccaggccttcgaccgccagcgcatcggtacgcgccatgatcacgaagctgtcatcggtgcgcgcatccacggcggccttgatacggtcgaccatttcctgctgggacacgatttccttgttcgggcgatgaccgcaacgcttggcgccgacctgatcttcgatatggatggcggccgcgccgaacttgatcatcgacttgacggtgcgcgccacattgaatgccgaggagccgaagccggtgtccacgtccaccagcagcggcaggtcgcacacgtcggtgatgcggcgtacgtcggtcagcacatcgtccaggccggtgatgcccaggtccggcacaccgagggagccagccgccaccccgccacccgacaggtagatcgccttgaacccggcgcgcttggccagcagtgcgtggttggcgttgatcgcacccaccacctgcagcgggtgttcactggcgaccgcgtcacggaaacgctggcctggagtcatcttgttattggaactcatcattcacctcgtgattggggagtgccgtccgggaagtgacgggcaatgttgcgtttggatgcgccgatatgccggcgcatcaacagttcggccagttcaccgtcgcgatcggcaatcgcgtcaagaatgcggtggtgctcggcaaaggcctggcgtggacgattgggggtggcggaaaactggatgcggtacatgcgcaccaattggtacagctcgccgcagagcatctgggtcagggtgcggttgccggcgccttggatgatccggtaatggaagtcgaagtcgccctcctgctggtaatagccgaggccggcctggaaggcttcgtcgcgctcgtgggtgtgcagcacctggcgcagttcttcgatttccgcgtcggtcatgcgctcggcggccaggcgacaggccatgccttcgagggattcgcggatttcgtagagttcgatcagttcgtcgtggctcagcgacaccacccgggcgccaacgtggggcacgcgcaccagcaggcgctggccttccaggcggtggatcgcctcacgcagcgggccacggctgatgccgtaggtgcgcgccagctctggctcggagatcttgctgccgggcgcgatctcccccttgacgatggcggcctggatacgccggaagacgttctcggacatggtctgggaatcgtcttgcgccaccactggggattccagctgatccagcatattgtcgacacctttaaaagcaatgccgcaaaaactagccaatcagcccaggatagtcaaagaataaatccatattgtcgacaatcgtctaataaccagggttgcacccaataggggcatggccgcctgccagcgctggcgccaaaaaagcatcatgttagaatgcccggcacttttgcctgacatcattggatgaaacggcgtacgagggagtttgcgcagcaatgccagtcgccttgaattgaacatcgcactgccgcctcgggatctatgagactcaaacccttccttctattaatgtgcctgttaaccgcacccggcctcggcgctgccgccgagaagaccgtctatggcctcaacgaatacgcccaactggccggtatcgacctggaagtcgcggccaaactggataccggggccaagaccgcctcgctcagtgcccgtgatatcaagcgcttcaagcgcaacggtgaatcctgggtgcgcttctacctggccatcgacaccgcccactcccaccccattgagcgtcccctggcccgcgtcagcaagatcaagcgccgcgccggtgactacgaccccgatgaggacaagaactacaccgcccgtccggtgattgccctggatatctgcatgggcaccgctttacgcagcatcgaagtgaacttgactgaccgcagcgctttccaatacccgctgctgatcggctccgaagcgctgaaacgctttgatgcgctggtcgaccccagtcttaaatacgcagcaggcaaacccgcctgcgccgccgacgctcataccgccgagtaaaccgaatgcgctctctgaccctgcacctgaagatcctgatcaccatcctggtggtcctgggtatttcggtcaccgcttatcagatcttcgtgctggggatccccgtcaccgaggacgccaccgacgacttgtggaacatcgacgccaaggtcgaattcgtcgccaacccgaaagacccggtgaagatccagatgttcgtgccgcccttgagccgcgacttcgtcagcctcaacgaaagcttcatctcgaataactatggggtaagcgtcaaccgcatcgacggcaaccgtaaggtcacctggtcggcccgccgtgccaagggcaaccagaccctgtattaccgcctggtgctgaccaagcgctacagcggcgaaaaagtcaaagtgaagggccccacgttccgcgacagcattgccgtggaaggcccggaaaaaatcgccgccgaagccctgctggcaccgatccgccagcactcggccgacgtcgagacgtttatcaccgaagcgatcaagcgcaccaacaacctcaacgacgacaacgtgaagctgctgctggcgggcgacccgtcgacgccgcacaaagccaagatcgtcgaattgctgctgtccatcgcccatgtgccggtggaaaaggtccacaccatccgcctggtcgccgaccaaccgcaaaccccggaactgtggctgcgtagcttcaacggcaatgactggttgtacttcaacccggaaaccggcgaacagggcctgcccgccgaccgcctgctgtggtggaccggtgatgaaaacctgatcaccgtcgacggcggcaagaaggccatggtgaccttcagcctgaacaacagcgagatgaacgcgattcgcctggccaagttgaccgacgagaacaccgacgccaacttcctcgaatactcgctgtacggcttgccgctgcaaacccagcagaccttcatgatcatggtgatgatcccgatcggcgtcctggtgatcctgatcctgcgcaacctgatcggcctgcagacattaggcacgttcaccccggtgctgatcgccctggcgttccgcgagacgcaactgggcttcgggattgtgctgttcacgattatcacggcgctggggctgtcgctcaggtcgtacctggaacacctgaaattgcagatgctgccgagactttcggtggtgctgaccttcgtggtggtgctgattgcggccatcagcctgttcagccataaattggggctggagcgcgggctgtcggtggcgctgttcccgatggtgattctgaccatgaccatcgaacgcctgtcgatcacctgggaagaacgcggcgccaaccatgcgctgaaagtggcgattggtacgctgttcgcggcgtccctggcacacctgatcatgagcgtgccggaactgatctacttcgtgttcaccttcccggcgatcctgctgatcctggtgggtttcatgctggccatgggtcgttatcgcggttaccgcctgaccgagttggtgcgtttcaaggccttcttgaaggctgaccagtaatgttcggcttctggaagacctggaaagccctggaagcgcgcgggatcatgggcatcaaccggcgtaacgccgactacgtgctcaagtacaacaagcgcagcctttacccgatcgtggatgacaagatcatcaccaaggaacgcgcgttggcggccggcatccacgtgccggaaatgtacggggtgatcagcaccgagaaggaaatcgacaagctcgacgagatcatcggtgggcgcagcgacttcgtgatcaagccggcccagggcgctggcggtgacggcatcctggtggtcgccgaccgctttgaagggcgctaccgcacggtgtccggcaagatcatcagccatgaagaaatcgagcatcagatttccagcatcctcaccggcctgtactccctgggcggccaccgtgatcgtgcgttgattgagtaccgcgtggtgcccgaccagatcttcaagagcatcagctacgaaggcgtgccggacatccgcatcatcgtgctgatgggctacccggtgatggccatgctgcgcttgccgacccgccagtcgggcggcaaggccaacctgcaccagggtgccattggcgtgggtgtggaccttgccaccggcctgaccctgcgcggcacctggctgaacaacatcattaccaaacaccccgacaccaccaatgcggtggatggcgtgcaattgcccaactgggatgggttcatgaagctcgccgccggctgctatgagttatgcgggctgggctatatcggcgtggacatggtgctggaccaggagaaaggccctttgatcctggagctgaatgcgcggcctgggctgaatatccagattgccaatgactgcggtttgaccctgcgtacccatgcagtggaagcgcggttggaggagctgaacgccgctggcgtgacggaaacggcggaggagcgggtgaagttcgttcaagaaatgtttgggcatattccaccggttgaaggctaaatgctgacctgctctgtacacccgctgccctatcgagccaaccccgccgagtatttcgcggcgattcgccatgcgcctggcgcggtgcttttggacagcggccggccggcggctgagcgtggccggtatgacctgctgagtgcctggccgaacgtcacgttgacagtatcgcccgatgaaagcggtggcgagttcttgcaacgtttgcggaaaaatctcacgcagctaggtgaagcaaatctgcccgccgggtatgagctgccgtttgccggcggactgatcggctacctgagctatgactttggtcggcatctggagcaaatgccgcatctggcaacggacgacctgcacctgccggatgcgcgctttggcctgtatgcctgggcgttgaccagtgatcaccaggcgcagaccagccagttggtgttccatcccacgctggccgagcacgaacggcagcggttgatcgcgttgttcagccatgacgttgccgacacatcggcgacgttcaaactccagggccccatgacgccggacctcaccgccgaggcttaccgtcaggccattgtgcgtatccaggattacatccaggccggcgactgttaccaggtcaacttcgcccagcgtttccgcgcgccgtgcagcggtgatccatgggtcgcttactgcgccctgcgcgaagcctgcccgacgccgttctccggattccagagcctgccggacgagggtgcggtgctgagcctgtcgccagagcgtttcgtgcacatcagcaaacgccaggtcgaaacccgcccgatcaaaggcacccgcccacgcggcctgacgcctcaggaagacgcggccaacgccgccgaactgctggccagccccaaggaccgcgccgaaaacctgatgattgtcgacctgctgcgcaacgacctcggtcgcacctgccgcaccggctcggtcagcgtgccggagttgttcagcctggaaagctatcccaacgtgcaccacttggtgagcagcgtcatcggcgagctggccgacggcaaggacgcgctcgacctgatcgccggcagcttcccaggcggctccatcaccggcgcgccgaagatccgcgcgatgcagatcatcgacgagctggagccgactcgccgtgggttgtactgcggttcgctggtgtatctggatgtgcgcggcgagatggacagttccatcgccattcgcagtttgctggtgaaggatggccaggtgtgctgctggggcggcggcgggattgtggcggactcgcagtgggaggcggagtatcaggagtcgctgacgaaggtgcgggtgttgttggagacactggacggtttgtagtgactgggctggcctcttcgcgggcaagcccgctcccacatttgactgcattctcatgatggaactcggtcaagtgtgggagctggcttgcctgcgaagaggccatcagccgcgctgaaagccttacaggctcaacgaccgattcgaggccttgatgaactctttcttcaaatcctcaaacgtatgcaccgccgggaactgcgggaattcgcggatcacgttttccggcgcatggaacagaatcccacggtcggcttcgcccagcatggtggtgtcgttgtaggagtcgccggcggcgatcacgcggtagtagagggtcttgaaggccaataccgactggcgcttggggtctttctggcgcagttggtaactgactacgcgatcggtttcgtcggtgatcaggcggtggcacagcagggtcgggaaacccagctggcgcatcagcggttgggagaactcatagaaggtatcggagaggatcaccacctggaagcgctcgcgcagccagttgacgaactcgatggcgccatccagcggcttgagggtggcgatcactgcctggatgtcggcaagcttgagcccgtgctcgtcaaggatgcgcaggcgctgcttcatcagtacgtcgtagtcgggaatgtcccgggtagtggcacgcagggattcaataccggttttttcagcgaaggcaatccagatttccggaaccagtaccccttccaggtcgagacaggcaatttccacaagacactcccttatagatgttgttggttgagcgagcaaaaacactgccgaactctagccattcacgctcgccgccgcaacgcagggcggtttttgataccatcgctcccctatagagcgctcagcgccactgacctgtaggaaccgtcctgatgaaccaagccttcgacgtcgctgaactcgccgcgacttatgccaacaaatccgcccaggacattctcaagctggcgttcagccagttcggtgatgacctgtggatttccttcagcggcgccgaggacgtggtgctggtggacatggcctggaagctgaacaaaaacgtcaaggtgttcagcctcgacaccggccgcctgcacccggagacctatcggtttatcgagcaggtgcgcgatttctacaagatcgacatcgagctgatctcgccagaccagagcaagctggagcccttcgtcaaagagaaaggcctgttcagcttttacaaggatggccacggcgaatgctgcggcgtgcgcaagatcgaaccgctgcgccgtaaactcgctggcgtcacagcctgggccaccggccagcgccgcgaccagagcccaggcacccgcagccaggtggcggcgctggaaatcgacacggccttctcgacaccggaacgcaccctgtacaagttcaacccgctggcacagatgaccagtgaggaagtctggggttacatccgcatgctggagctgccttacaacagcctgcatgagcgcggcttcatcagcatcggctgcgagccctgcacccgcccggtgttgccgaaccagcatgagcgtgaaggtcgctggtggtgggaggaagccacgcagaaggaatgcgggttgcatgcggggaatatcatcagcaaggcctgaagttgcgctgtaaaaaatgtggaagggggcttgcccccgatagcggtggtcagccaggtcaatagtgactgacactccgcaatcgggggcaagccccctcccacatttgatttgtgttggccactgaacgtgtacacacacatgtaactatcggtgccatttatgtgtgcaatccatcttgtggcgcaccattacgtaacacctctccccacctgtcttttgtctttgcaaatcgcccggttcccaccaaaaaataaatagctgttcaaacggtcaatttatatcgctttaaattcaactagttattccatgcacctaaaaaaacgaaattacccaaggttttcatagatcaaaaactggcacgcaagtggcttaaggtgaaatacgctttgtatacaataaatacaaaacctacatacactttgccatctgcggcctggctgccgatgtgctggagcctgccggaatgcgtacaagcctctcgaataacatcgcactggatctgccctcctccctgaagcccgaagccatcgagcccagccctctggtgctgagcccacgcctgcacaacaaggacctggcgcccaccaaggttgaaggccggcgctggggtcgctatagcatctttgcgctgtggaccaatgacgtacacaacatcgccaactactcgtttgccattggcttgtatgcactgggcctgggcggctggcagattctgttgtccctcggtatcggtgcggcactggtgtatttcttcatgaacctgtcgggctacatggggcaaaagaccggtgtgccgtttcccgtgatcagccgtatcagcttcggcattcatggcgcgcagattccggcgttgatccgcgcggtgattgcgattgcctggttcggcatccagacctacctggcctcggtggtgttccgtgtgttgctgacggcgattcatcccggctttgccgaatacgaccacaattcgatcctgggcctgtcgtccctcggctgggtgtgtttcgtggcgatctggctggtgcaactggtgatcctggcctacggcatggaaatggtacgccgctacgaaggcttcgccggaccggtgattttgctcaccgtggcgtcgttggccggttggatgtatttccagaccggcgggactatcgcctggtcgatccgcgagccgctgagcggcggcgagatgtggcgcaatatctttgctggtggcgcgctgtggctggcgatctacggcacgctgatcctcaatttctgtgacttcgcccgctcctcgccctgccgcaagaccattcaggtcggtaacttctggggcctgccggtgaatatcctggtgtttgccgcgatcaccgtgctgctgtgcggcgggcagttccagctcaatggccgggtcatcgaaagcccgaccgaaatcatcgccgccatcccgaataccttcttcctggtgctgggctgcctggcgttcctgatcgtcaccgtggcggtgaacatcatggccaactttgtcgcaccggcctttgtactgagcaacctggcgcccaagtacctgaacttccgtcgcgccgggttgatcagcgccaccgtggcggtgctgatcctgccgtggaacctctacaacagcccgctggtgatcgtgtacttcctctccggcctgggcgcgctgctggggccgctgtatggggtgatcatggtcgattactggttgatccgcaaaggccaggtcgacgtgccgcagttgtacagcgaagacccaagcggcgcttattactacagccgtggagtcaatttgcgtgcggtggcggcgtttgttcctgcggcggtgatcgccattctcctggctttgttgccgggtttcgccagcgtctcaccgttttcctggatgtttggcgccggtattgcagggctgctgtacttgctgatcgccaagcgccagccgttctacgccgatgtcagcggcgaaagcattgccgtcgataacgtcagtcattaatcaaggaccttccatgcgtatcctcgtggtcaacgtcaacaccaccgaatccatcactgaaaccatcgcccagcaggcgcgcgccgtggctgcgccgggcaccgagattgtcgggctcacgccgtacttcggcgccgaatcggtggagggcaactttgaaagctatctggcggccatcgcggtgatggaccgggtgatggcctatgaccagccgtttgatgcagtgatccaggccgggtacggcgagcatggtcgtgaaggcttgcaggaattgctcaacgtgccggtggtggacatcaccgaagccgccgccagcaccgcgatgttcctgggtcacgcctactcggtagtgaccaccctggaccgcacggtgccgctgatcgaagaccgcctgaaactggccggcctgtaccagcgctgcgcctcggtacgcgccagtggcatggcggtgctggagctggaagaaaacccgttggcggcgatggaagccatcgtgcgccaggccgagttggccatcagcgaagacaaggccgaggtgatctgcctgggttgtggcggcatggccgggctggatgagcagattcgccagcgcaccggcgtgccggtggtggatggggtgacggcggcggtgaccattgccgagtcgctggtgcggttgggactgtcgacgtcgaagatcaggacttatgcgacgccgagggcgaaaaaagtcatcggttggccgcgctgaagcgttggttcaactgctgctcggcgaattgctcaatgatgaaatccacaaacgcgcgagtcttgccgggcagcagtttgtgttcggcgtagtaaatggagatgttgccgtcgtcgacgtaccagtcgggcagcacccgcaccaccgcgccgctgtccaggaatggcacggccataggcatgctcaccaaggcgatgcccaggccttgggcgctggcgcagcaggcggcttcggagtcgctcatggtcatgctcggcttgagtaccagcgggcggtgttcacgctcgatactggtcaattgccaggaccgtatacgaccggtctgcggtgaacggatgaggatcccgtggcaacgcgtcagatcttcgggcacccgcaccgaaggacgctgcgccaggtagtccggggacgccaccagcactcgatgggccggcgtcaacttgcgcgccaccaccccctgaggcagctcgaagccaccaccaatggcggcatcgaagccctggccgatcaggtcgacctggcggttatcgaaatgccagtccgggctgatgtccgggaagcgacgcataaacgcgcccaacagtggcatcacgtagcgattgccaaatactgtgcccatgctcactttcaaggtgcccaccggccgcccttcggcgctggccaggttggccacggcgttctggatggtggtgaggctgccgctgacctcttcgaggaacagcttgccggcttcagtgagggtgaggcgccgagtgctgcgctggaacaggcgtacacccaagcgcgcctctagcttggcgacacttttgcccaccgccgccggtgtcaggctcaggtgccgcgccgcttcggcaaagctgccaccttcggcgctgcgcacgaaacattcgatactgccaaagccttccatatcgaccactctaaacttttggtttacacagactatagcaatcctggtctaccgggaggggctggcgaggtcgatactcggttccaacaacaaggcatcccgccttgaacagcttggagatcgacatgaccacacaaaacctcagcggcaaagtcgccttgattcaaggcggttctcgcggcatcggcgccgccatcgtcaaacgtcttgccgcgcagggcgcagccgttgcctttacctacgtcagctcggccgccaaggccgaagaactgcagaacagcgtgatcagcgaaggcggcaaagccctggcgatccatgccgacagcgccgatgccgatgcgatacgcaatgcggtcaacgccaccgtcgaagcctttgggcgtctggatatactggtgaacaacgccggcgtgctggccatcgcgccgctggaggatttcaagctggaagactttgaccagaccctggcaatcaacgtacgcagcgtgtttatcgcaacccaggaagcggccaagcatatgggtgaaggcggccgcgtgatcaatatcggcagcaccaacgccgagcgcatgccgtttggtggcggtggcccgtatgcgatgagcaaggcggcgctggtggggttgaccaaaggcttggcgcgggatctggggccacgtgggatcaccatcaataacgtgcagcctgggccggtggacaccgatatgaacccggccaacagtgattttgccgagagtttgattgggttgatggcggtcgggcggtatgggcatgtggaagagattgccagttttgtggcttacctcgctgggccggaagcgggctacatcaccggtgcaagtctgaccatcgatggtggcttcagcgcctaggatttgcggaacaccgcaaatcaaatgtgggaggggcaagtcgaatcgtcgcaccgcccctcccacatttttaaccgcgatcaatcaggctcgaggtggcaggccgtaggccgccaggtcgaagtccgcgagcttgcggatgatctggtcggcgtggtgatacttgctgtcggccatggcttcgtccggcacggcgatggcggtcatatgggcggctttcgcagcagtgacgccgaagggtgagtcttcgaacaccaggcaatcctgcggtgccacgcccaagcggcgggcggcagtgaggaagatgtctggcgcgggtttggcggcgcccacttccgggtcgtcagcggtgacgatggtgtcgaacaggccaaaccattcgcggtgcaaggtggtcttgtgaccaaacgaattgcgcgacgaactggtgcccacggcaatcgggatattgtgcgccttcaagtgccgcaccaaggcttcggcgccgggcatgcccaaggccttggggaaacgctcgctcatcagcggttcccggatcttgaggaattcggccggtgtgatcggcaggtccagcgccttcaccacgtagtccgccaggtcctgggcaccgcgcccgataatgtgctgcttgatgccccagtcgtaggtgcggccgtagcgctcggcgatgatttgcgtgacttcggtatagatgccttcagtgtccagcaacaacccgtccatatcgaaaatcacggccttgatcggaccgactgcggtacgcggtgcattcatcacgacaacccaagggaaagactaaaaggattcagcacaatagcggtgcgggtcccatgcaggcaaccgccatgactttgtatcgattcgattcccgagttgatggcccttcatatcagtgcctcataactggcaacagttataccggtcggtgtgtgcggcgaccgtctacggtttgtgagggcagcgcgaaccgccactggccggcgtctgaaaatatcgcttgataaccttataaaagacttattaatcttccaatgaactccatccactggactagaaaatccgtaaagcaactgcttcggttgcatacgtatcatcagcaacaggtacgcgatgcggtgtcagcgctcgagcgcatgcccgaggcagccaacgtcaaggcattggtcaattacccccatggttatcgcttgcgcgtgggtaattaccgagtccttttcgattgggatcgcgatatccatgtggtcagcattgaagaggtcaagaagcgtgacgagcgaacctactgccgtacagatcatccacaatacggagggcaagccagcctttgtggtgattccctatgaacattatctggcccggcagaacgatccaaatctgattccccatgcggtggtaagccgcctggtggatggggcaacccctatccgtgcatggcgcgaacacctgaacctgacccaggaagaagttgccaaacgcctgggcatttcccaatccgcatttgcccaacaagagtcggtgaataaacctcgccgtgcaacgcgggaaaaaattgccaaggcgttcggcatcaacgccagtcaactggagctatagagcgttacgctggaaatctgccccctcagtcccctcacttaagggcttccacctggatccgcgcatgggccagtgccgtagaggccgatgctacaggccctttagtgccaaacttcacactgcccgaggcaggcaacccatgccggccagggtcgtctccaccgcttcatccagcggcgtgcaaggttcaacgcccaataccgcaaccagccgcgtgttatcgagcagcacaggggtttgccacaggtaacgcatctccagcatttcacggaaggtgacgacaaaaggcgaagctattttcagcagccaccaggggaacatcctgacgacaggctgttgccccgtcctacgcagcaccacgcactggatcgccctgctcacctgtgtgccatccgtgtccacctgccccgccatatgaaaacgcgcgaacgcctccagggtttcacggcgctcgagcagttcaaccatcgtacgcgccacatcgggcaggtacgcccactgatgggcaacacctggcgcccccggatagttgacgctgcgcacgaggttgccaggtttgaccaagccctgggaaaaccagctgttggccgcctgcgcgccgaaaaaatcaccggcgcgcacgatcagcacccgcgccccgttgcctgaagcttcgtataaccgttgctccagttgcacacggatcgcgcccttgcgggtttgcgggtgttgaggggagtcttcgtgcagtacgggaaacgcgtctggcccaaagttgtagacggtaccgggcaacacaatggtggcgccttcagcaacggccgccgcaatggtgttgtcgatcatcggcagcacccgctcggcccagtgccgatagcccggcgggttgaccgcgtgcacgatcacttcacagcctcgggctgcggcaagtacgtcatcgcggttgagtgcatcaccctcaagccagtcaaatgcggcgttctggccacgggccttgtcggcatcacgggtcaacgcgcgcacctgccaacccgccgccagcagttgccgtgcgacttcgccaccaatgccaccggttgcacccaacaccaatactgtattcatcacacgctcccacgctggttgatggggacattttctgcgcggccaggctatagaggaattgtcgaagaccattcaggcgctatacatttatgcatggcaacgaatattggttgggagctttaccggtcgttccttggcgtgttccgggaaggatcgctgtcgggggccgcacggcaactcggcattacacagcccacggtcggccggcacatcgccgcgctggaaacggcgctgggcgtggtgctgtttacccgttcacccaccggcttgttgcccacggccgtggcccacacgctgcgcgcccacgccgaaaccatggagcgcacagcggcggcacttgagcgtgcagcgtctgcccagggtgatgaagtgcgcggcgtggtgcgcgtgtccgccagtgaagtggtcggcgtggaagtgctgccgccgatcctcacgcaagtgcgccgggcacacccgcacctcaaggtcgaactggtgctgacaaaccgcctgagcgacctgttgcaactagaagccgacatcgccgtgcgcatggtccgccccagccaggagcaactgctggcgcgacgcatcggcctgatcgaagtaggcctgcacgcccgcgacgattacttgcagcaacacggcacgcccctgttgatgcaagacctggccggtcactcagtgatcggtttcgaccaggaaaacgcatttatccgcagcctggccatcaagggtttcgagcgcagcgcctttgccctcagcagcgacagcgacctagcccaactggcactgatccgtgccggtgccggtatcggcgggtgccaggtccaattggccaagcgcgatccccgcctgcgccgggtcctgccggaaggctttgcactcaagttggacacctgggtgaccatgcacgaagacctgcgcagcagcccgcgctgccgcgtgatgttcgacgcgcttgtcgaaggtttgcagcgttacgtacaggattgagacagcttcactggtgaagaatcagactccctcagtcccttcacagacgcccccatgtccgaagccttcgaagtccccagcccccacgaaaaacacatcgaacacaccaccgaacatgcccacggccgcggtgacaacttcgccagccgcatcgccgtgatgaccgcgctgatggccacccttggcgccatgctcagctaccaggccggctccaccgaaagcgaagcggcaatggacaagaacaacgccgccatcttcaagaccgaggccgccaaccagtggaactactaccaggccaaatccagccggcaaaacctggcagaactggccacccacatccccggtgtggatgcggtgcattacaaggaagagatcgagcgctatagaagccagaaggaagacgtgcgcaaacaggccgaaaagcttgaggccacctcaaaggaatgggatgaaaagtcggaacaggcgctgcaccagcaccatcgctgggcccaagcgatgaccgcgattcagatcgcgatttcgttggcggcgatcaccttgctgaccaggcgggaatggttgaagcgcctgtcgtatacggcaggcggagcagccgtgatattggggagcctggcctggctgcatttataaaaaatccccttgggcgccagagccttaccgctacatagtaaacagcataacgaaacccgaggagataccggtgtccgcacaacccaaggaagctgtgggcgccgcctacagcatcgacgccatgcgctacgcccaaggcatgacctggcaagccatcgaacacctcgcccaacgcatccgccccggcatgctcgaatccgaagcccgcgagctgggcaaacacgtcctcgccgaactcgacatgcagcgcatctggcacccactgctggtgcgctttggcgccaacaccctcaagaccttcaaacaacgctccgacggcgatccgatgctgggcgacaacgacatcttcttcatcgacatgggcgccctctggcagggtcacgaaggtgacgccggcgccaccttcgccatcggcaacgacccggacatgcacgcctgcgccagcgccgccaaagcactgttcgaccgcgtgcaagcccgctggaaaaacgaccaggtcgtcggccaggagctttaccgctacgccgaagcacaagccctggccatgggctggcaactgaacctcgacatcaagggccaccgcgtctgcgacttcccccacgccatccaccgcggcggcgacctgggtgacttcgagcactacccgaacgccggcctgtggatcctggaaatccagatcgcccatccgagcaaaccctacggggctttctacgaagacctcctcgcttaaggaacgcaaatgaaccgcgccaccgaacaccccgtgctgttgttttcctacggcacgttgcaggacaaatccgtacaactggccaacttcggccgggaactggcgggccagcaggatgcgatgctgggctattcacagagctgggtggagatcaccgaccctgaggtgctggcaagcagtggcaagacgcatcatccgattgtggcgccgagcgctgaggcaggcgccaggattgaggggatggcgttccggattacggagcaggagctggcggcggcggatgcgtatgaagtggcggactacaagcgggtggaggtggggttggcttcggggttgagggcttgggtgtatgtgcgggcgtgatatgaacaagggcggctgaattggccgccctttcgagagagtaccgagcctacttgcacaccattgacacttgagtttggtgctcatactcccaccctctacacgccaaccctacgtgcttgggaatcaaagcagcaccactgctataggccgtgatagtcctacgtgagaagcccaattcgaccgcagcggcggacagggaaagattgttgctgagcatccactttctgaaatcctgcgtgagcataacctcgccggactgctccagtgccaggcggtgcaaggtcacggcagacagctcaaggtcattgccccatgtcacatcaaagccccattcacctacagctacttggctgaagagccccaggtccataagcggcttgaggatggggaaagtttttatatgatcgatgagatcgacggtatgttgcttaccattgttccactcgatttctagagcatgcttgccggcaactggttgcacagcagaaatgcgaagcttgctggtcataagtcagttcctccggttttgttcatcccatacccgatgaagatcagcgatatgagcttttgcccaattcagggcggctttcaaggcctttgtttcggcacctgcgccaagcacgacaagcccttctatctgaaccaaacactcgccatccggggtctgcacgtgaaagtgcggtggcgcgtggtcgtcgggatagatttttattttccagtttcgttcactgtgaagagtagccatgaggtcagatgctagagaaatattttccctggcacaactcgattttcttacctcgatagtcccgagaccttagctttctggaaacctatagcaatcggttgctggcaccttgagcaacatcacaagtttgcgaaatgtcctacgcgctttccggaagcgccactctcccacctcatcatctccatgcctatagtcaccgggtcgctcgaagagcgattgggtttggcgacccgactacaagacggcagaagcctcccggcagatttgcgggatgcccctgtacgcaataagctgctccatggtggctgtgcgtgggagaccttcgggtctgccggtctttgtccgttcttgtcccggttcgccaacctgcgtacagctgccaccttttgtttggcgacaaatgcgtggctccccccctaagtgaacggacttaacgcatgaaccaatacatggccctcaccagcaacgacagcaccacacccgccctttttgtcgacacaaccgtcccgcttgaaatcctcctcgacgctgcgaactatcgacttcgtgctgtgacgcaggtgcttgaaaaccttgcgctgcgtagtgagataagcagcgatgcggtggtactcagcgactttgctttactgtgctctatcccgttgcgggatgggtgtgacttgctggatatcatagagcggcgaatggatgtatcgcagccttagaagatattgcatgccgctttaggactatagctgccagtttcccttggttcggtataccaatccaaggggtgctggtttccgagggccgtgaaaaggcccccacacttggcacagatgtgggggccattgaacataagcggcgttattggtaatcctacaggtctaaacctttatggatttcatctagggtcacatccagctcttggttcaactggtcatgtacggtttggctgactaacccatgagtcagcagcgcagccagatagcccagcgtgtacatcgcaaagccgtgccgcttcgccggttcgttcttgaccctttcgatgttttctttcaagaggatgaatttactacgcgcttcggcaatggtgcgcgggctgtctttttcggttgggagcatcggcatagcggggattcctttctgttcgtaaagccttattgaaaggcttgccacaattgatagcagaaaatccacattaacagagagcctgcagccaaaccgcttagcactgaagggaccaaaaaaaaccaccataccctctgtgaccgaacttgaaattactgacttgatgcgatgaaccgctggataagttctggcccactcatgttttgtatcatcgcgctcgttcgagacatatggatgttgctccatatcatcttgatgacctcccaagctataaataacaccagagaaagcacagcaagaagcccacagagggcatacaaccgaggcggtagcttcggggaaagtgtggaccaaagcccaaaaaaccctgcatagcctgctactaagatgaggttgatataggttcctgcactagccatctgcctttcgtgcatctgtatcagtgcgttagcgcccttatctccttccagatgaagctgaaattctttgagttcatcaatagcttccgagtgcgtattcaccacggtttccacctgctcgttccattgctgctgattcatctcgttccgctcctttggagagttattacagatgggctcgtggacgcaaatatcgaccggcgtcgagcccaatatgcgccagatgatttggcgtgaaaaccaccctaagctcccgggttccgcacgctccgtttttcgcaccaatatagagcaccagtcccatggtggtcccatgaggctattttttggacgccaaaaaccacaaacccccgactttctctaggaaaatcaggggtttgcgttttcgtaatttggcggtgaaggagagattcgaactctcgatacaatttcttgtatacacactttccaggcgtgctccttaagccactcggacacttcaccgtatctcgtcaaaccagttcagtctgtcgaggcgcgctaatgtagtcgaaagcctttctgatggcaaaggtttttttcagaatattcatgcggttagccggttatgccgctcaccgcccggcaacgggcggtgattgtgccattctcaggcatcggcggtagacgtctggggcggcgattgcgccctgcgccaggcattccgatgcgctgtgcagggcaaaagcctgaccggccagtcagtcacagcgctttaccggggcgggcgtggtgggtaacgtctgctgcattcttctataacaagtcctacaaggaaccgcgtcatgagtgagttgattgcctaccacctcgaagacggtatcgcgaccctgaccttgagcaacggcaaggtaaatgccatttctccggcggtggtcagtgcctttaatgaagcgctggaccaggcggagaaggaccgggcggtggtggtgatcaccggcacgccggggattttgtcggggggttatgatttgaaggtgatgaccgccggccccaaagaggccatcggtctggtgacgtccggttcaacgttggcgcgtcgcctgttgtcgcacccgttcccagtgattgtggcgtgcccaggacacgcggtggccaagggcgcctttttgctgttgtcggcggactatcggattggggtggatggcccgttcagcattggcctgaacgaggtggcgattggcatgaccatgcaccacgccggtatcgagttggcgcgggatcgcctgcgcaagtcggcgtttcatcgttcggtgatcaatgccgagatgtttgacccgcagggcgcgttgcaagccggcttcctcgacaaagtggtggcaccggaagagctgcacgcggcggcgctggaagcggcgcgtcagttgaagaagctcaacatgaacgcccacaagcacaccaagttgaaagtccgtaaagaactgttggaagccttggacgacgccatcatccaggaccaggggcatatcctgagttaagccctacgcgtgatgtaccaaagcccgaccttgagtcgggctttttcttacaaccaattccgaatcatcttcagccgctctagcttgcccgtatcgacagatgttgaaacatgcgcttaaacatcgcctatctcctacctctaccggggtaattgccgaatacagtgcacaaccgtacactgcgccaccttttgtgccggtgggccgtgtcgatgcttttcctgttgcgtatgttgttgatgggcctgcactttatgcttgccggcgtgctcggcgtgctggttggtgtgtgccggccgttcaacccggacaacagtcgcctgtgcgcacgcctgtacgcgctgccggccatgtggatcctgcggctcaacgtgaaggccgatgtggactcgctgcgcaacaagcccggcacctgcgtgatcatcgccaaccaccagtccaactatgacctgtttgtgttcggcaccgtagtgccctaccgcacggtgtgcatcgccaagaaaagcctgaagtgggtgccgctgttcggccagttgttctggctggcgggcaatgtgttgattgaccggggcaatgcccacaaggcacgccgggcgatgcttaccaccacccacacgttgcagcacgaagacacttcgatctgggtgtttccggagggcacgcgcaacctgggccaagggttgctgccgttcaagaagggcgcgttccatatggcgattgcggcgggtgtgccgattgtgcaggtgtgtgtcagtaactacgtgacacatatgcagctcaatcgctggaacagcgggggtgtgctcatacggtcgttgccgccgattcctaccgttggcctgacttcggatgacatcccggcgttgatgcaggcgtgtcatgcgcagatggaagcctgtattgacgagatggaccgcgagttgcgggctgcctgaacactgcttgggggcgcttcgccccccagcgcgagcaagctcgctcaccacaaaatgctcgatgcaacgacggaacgccattcaggctaagctgcccaacacctgtcatcccaataagaagcgatcagcaccatgggtagagttgttgcggccgccgtctacagcgccggtaagaaagtttcggatatcaccctcgatgaaggcgcggcctgggccgccaaacccgaccactttgtgtggatcggcctggaagaacccaacgcccaggagctggccaacctgcaacgccagttcaacctgcatgaactggccatcgaagacgccctggaaaaacacagccgccccaagctggaaaccttcggcgatgcgctgtttatcgtcacctactcaccggtgcgcgagaacggcaagctggagtttatcgaaacccatatttttgccggcaacggctacatcatcaccgcccgcaatgggcactcggcgtcctacggctttgtgcgccagcgttgtgaggcgcggccgctgttgctggagcatggggaagatttcgtactgtatgcgctgctggatttcgtcaccgagaactaccagccggtgagcgaagcgatccacgccgagatcgatgaactggagcgcaacgtgttgtgcagttcgttgagcgagcgcgatatccagaacctccacggtttgcgccgcgatgtgctgcggctcaagcgttacgtggcaccgatggtggagatcagccaggagctgcagaagctcagcttcccgttcatcgacaagaacatgcgcccgtactttcgtgacgtgcagattcacgtgacgcggcagatggaagacctcaccaccctgcgcgatatcgccagccagaccatcgaaatcggtgtgttactggaggcttcgcgccagagcgtggtgcagcgcaagttcgccgcatgggcggcgatcctcgcattccccaccgcggtggcggggatttacgggatgaacttccagaacatgcccgagctgcaatggcactacggctattttgcggtactcgggctcattgccacgggttgcacggggttgtgggccagtttcaaacggtcgggttggctttaaacctgagcttcggacttgtgcgccacaaaccgcatcatccattccgccacggttgcaccgtggtggtcgcgctcaaggctggctacgccgtttgtgtagaccttttcgcccagggttgtctgaagaatctccagcaactcgcgggaataatcatggacaaattccgggtgtccctggaagcacagcacctggtcaccgatgtgatacgccgcgaacgggcaaaacgcgctggaggcgatgacggtggcattctccggcaacgtggtcacctggtcctgatggctgatcaatagggtcaattccggtacttcagggctcatccacggggccttggcatcgagctggtagtcgtggatgcccatgccccagccttggccggcgcgctcggtcttgccgcccagcaacagtgccagcaattgatgaccgaagcagatgccgagcagcttgtcgccacgctcgtaacggtcgagcaggtaggtcttgagagtctggatccatgggtcagtgccgaaggagtcggccttgctgccggtgaccaggtacgcgtcgaacacttcgtcgtccgaggggtattcaccgttcaccacgttgtacaccacgaactcggcgggaatcggctgcttggcgaacaggcgcttgaacatctgcccgtacccttggtattgatcgatcaagcctggacgcaggatatcggtttccaggatacagacgcgtagcgacataaaaaatacctgacacggtgatgggaatattgcacaccccagagcctgccttgaaataccccttcaaggcaagccccccagcttcaccggaacacttcaccctgcgccgctttctccagcaacaaccccggcagcatgaaacgttcgccatactgttcagccaggtagcgagcgcgggcgataaagtccttcagcccatattggttgatgaactgcaacgcaccaccggtccaggccgcgaaaccaatgccaaaaacagaccccacgttcgcgtccgccgtggacatcaacaccccctcttccaaacagcgcaccgtctcgatcgcctggataaacagcaggcggtcgcgtacatcctgcggcgagatgcgctgatcaggtcgctcaaagcggcttttcaactccggccacaggtacttttgcccgccgctggggtactcatagaaaccgcctcccgccgccttgcccgcgcgcttgtattcgttgaccaacagatcgatcaccgctgtcgccgggtgcgtaggcagcgccttgccttccgcctgcagatccttggccgtctgctgtcggatatggctcatcaggctgagggacacttcgtcagacaccgccagcggccccaccggcatgccggccttgcgggcttcggtctcgatcatcggcgcggccacgccttcgccgagcatggcgatgccttcgttggtgaaggtgccgaacacgcgtgatgtgaagaagccacgactgtcgttgaccacgatcggggttttcttgatttgcaggacaaaatcgaaaccacgggccagggtctcgtcactggtgcgcgcgcccttgatgatttccaccagcggcatcttgtccaccgggctgaaaaagtgcaggccgatgaacttggcttgatccggcactgccgtggccaggccgctgatgggcaaggtggaggtattggaggcgatcacagcgtcggcgccgaccaccctttgcgcagcggccgagaccttggccttgagttcgcggtcttcgaacaccgcctcgatgatcaggtcgcagcctgccagatcagcatcggatgccgtaggacgaatccgcgccaagacggtttcctgctgctcggcggtcaattgcccacggctgaccttcttgtccagcagcaccgccgaatgcgccttgcccttctcggcggccgccaggttgatgtccttgagcaccacctcgataccggcgctggcgctgacataggcaatgcccgcccccatcatcccggcgcccagcacaccgactttgcgcgtgacatacggtgtaaacccttgcggccgcgaactgccggcgttgatctcgttgagctggaaccagaaggtgccgatcatgttttttgcgacctgccccgtcaccagctcggtgaagtaacgggtttcgatcaggtgcgcggtgtcgaagtccacctgggcgccttcgacggccgcacagagaattttctccggcgcggggaaacagccgttagttttactgcgcaaaatcgacggcgcaatggccagcatctgcgccacttttgggttcgatggtgtaccgcccggaatctggtaggccttgttgtcccacggttgcctggcgtccggattggccaggatccaggctcgggatttggccagcaactcatcgcgatccgccgccagctcgttgatcaagccggcttgcagcgcctgttgcggccgcactttcttgccttcgagcaaatacggcaaggccttttccagcccgagcatgcgcaccatgcgcaccaccccgccgccgcccggcagcaggcccagggtgacttccggcaagcccaactgcaccgacttgtcgtccagcgcaacgcggtaatggcacgccaggcaaatctcccagccgccccccagcgccgcgccattgatcgcggccaccacgggcttgccgagggtttccagacgccgcagttgcgctttcaacacccgtacaccgtcgtagaaatccttggcgtgggccttgtcgaccttgatcagttcattgaggtcgccacccgcgaaaaacgtcttcttcgccgaggtaatgacgacgccggcgatgctatccctttccgcctccaggcgctccaccgtagccgccatggcctcgcggtacactgcgttcatggtgttggcgctctggccgggcatgtcgagggtcagcaccacgatgccgtcctggcctttttcgtaacgaatggcttgggtcatgacaagttccttgggctcagaggcgttcgataatggtggcgatgcccatgccaccgccgacacacagggtggccaggccatagcgctgctggcgtacttcgagttcgtcgagcagggtgccgaggatcgcgcagccggtcgcgcccaacgggtgccccatggcaatcgagccgccgttgacgttcacgcgtgcggcgtcgatgcccatgtccttgatgaacttgagcaccaccgaggcaaacgcttcgttgacctcgaacaggtcgatgtcttcaacgcgcagtccggccttggccagggccttgcgcgtggcgggcgcggggccggtgagcatgatggtcgggtcggtgctggtgaccgctgtggcgacgatacgcgcccggggttgcaggcccagctcgcgccccttggcctcggagccgatcaacatcagcgcggcgccatcgacgatgccggaactgttgccgggggtgtgtacgtgatggatgcgctctacgtggctgtagacacgcaacgcggtggcatcgaagcccatctgcccgatcatttcgaaactcggcttgagcttgccgaggccttcaagggtggagtcgccgcgaatgaattcgtcatggtccagcagcacgatgccattctggtcctgcaccgcgatcagcgacttgttgaaggaaccgtctgcacgcgccctcgccgcgttctgctgggaatgcagggcaaaggcgtcgacgtcctcgcgggtgaaaccttccagggtggcgatcaggtccgcgccaataccctgtggggtgaagtgactgtgcatattggtctgcggatcgagcacccaggcgccaccgtcactgcccatgggcacgcgggacatggactcgacgccgccgaccaccaccagatcctcgaagccggagcggactttcatcgcccccaggttgaccgcttccaggcccgacgcgcagaagcggttgacctggaccccggcgacgctgatgtcccagtccgccaccagcgcggcggtcttggcgatgtcggcgccctggtcgcctaccggggtcacgcagccgagcacgatgtcgtccacctggtgggtgtccaagtcactgcgcagggccagcgccgtgagcaggccggctaccaggttcaccggcttgacgctgtgcagggcaccgtccgccttgcctttgccacggggggtgcgtatcgcatcaaagatcaacgcttgggtcatgacgtcctcgaaccagtgtgcatgtgtgcctctaccttaggcccgattgacacggtttcaatgacggatgcgctcattgcttttgaccccctcgctcggacgaacggtaggcacctaaggtaatcacctgattaatcgttttagctgtctagccaaggcattggcgccaagatggcgatatgcctcatgcctttttaagctgaaattctgattagctgatatgaaatgagtctaagccgcgaagaacgagggctctaaggttgaatcagtaagaagttgctgccgggttttgctggagcaactgtaagaaaagcgacacgtcatctcgccatactgaaataagaccggcacgcatttgacgctcaggaataacaacaaaaggcagtcagccatgttcaaacattcgaaagtacgtcaggcgggactcattctgttcgccaccacactgattctgatcttgcccaatttgaccaaggtcattgggtgaccccccaacgccacattccgtgcattcacagcaccgggtctgcagcttttggcagcgcctgccaggacattgcgcatagcggtccggcaggggctgtctttttgcgcgccgatttccggtatcgttagcttaaacagccctttgattcgagcctgcgtcttgaaagccatccttgccctcctcgccctgctgatcgcgcttcctgctgcggccgcgcaattgaccatcgaactcaaccactcccgcaagacctggcagaccgccgacttgctcaagcacccgcaagcgcagacggtgcagatcgacgatgacgtctcctacaagcgcagcatgagttatcgcgcagtgccgctggccgtgctcctaccgggtttgaaacccgagagccatctgcaagcggttgccctggatggattcgccgccgaactcaccgccgcgccgttgctggaacaacagggtgcacgtgcttggctggcggtggaggatcctgctcaaccctggccggcactggcgcagggcaaacccagtgccgggccattctacctggtgtggaccgacccgcaagccggggctatcagccctgagcagtggccgttccagatctccgggatcaagcagttgaacacggtagcggagcgctttccggcgttgttgccggatccgaagctggcggccaacgacccgatcaaccagggttttgccctgttccagaaaaactgcctggcctgccaccgcatcaatggcgccggagacgcccaggtgggaccggacctgaatatcccctacaaccccaccgagtattttggcggtgatttcctcaagcgctatatccgcgacccacagagtttgcggaattggccgcaggcgaagatgccggcgttcgcggccagcgtgttgccagacggtgagctggatctgttggtggggtatttgaagcatatggccgggcgtaaacagcaaccttaaacatccggtggtgaacgcgttgtggtgagcgggcttgccccgcgttgggctgcgcagcagccccaaaaccaggaaccgaagaaactcctgacacaccgcattctgcttgatcagggctgctgcgcagcccaacgcggggcaagcccgctcaccacaacaaatctgctcaccacaacaagtccgccagccacaacaccccgctcgccgcaaccgaatcattgctgctggacggaaatcaccggcgtcggcgccacgaacaccttcgcatgcatctgctcgtgccccccgccccggcgcatgccgcgcaccgggcaagcgtctaggtaatccagccccaccgccagcttcaagtgccgctccgggcgggccaactggttggtcacgtcaaagctgtaccaggcgtcatccagccaggcttcggcccaggcgtggctggccaggtgcgtgctgtcctcggtgtacaaataccccgacacataccgcgcaggaatgcccaggctacgcgcacaggccaggaacgcgtgggtgtggtcctggcacacgcccgcacggccggcgaaggcctgggcggcgcaggtgtcgacctcggtcgcgccgggcgtgtagaccatcgcctggttaagtgcctgcatcaggtcgatcaatgccgtacggtcgcgccgttgatggcagtgctgttcggcaaaaccacgcagggcttcatcgggttcggtcaggcgcgtgcagcgcaggaacgggaacgccgattggctctcatgctcggcctcgcgcaactcgtcgatgtccacctggccacgcgcgccaatgatgatggcgtcgtggggctcgtccagggtcaacacatgcaggatgttgccgaacgggtccacctgggcacgcaccgggcgtggcaggtcaagttgccaactgagtacatgctggcgctcgctgtcatggggcgtgaggcgcaagtattggatgctggcgcgcacctggtcttcatagtggtaggtggtttcgtggctgatggagagtctcatgccgcctccaggtaggaactgtagatggcgtcgcccaactggcggaccaaaggaataaagtcggtcagccaggcgtgcaggccttcctcaaggatttcatcgatggcggtaaagcgcaggcgcgcatccatctcggcggccaggcgctgggccgggcggccgttgatgccaggcaggctggcgagtatctggtcgatctcttcactgcaggcccgcagtgagcgtggcacatcggcgcgcaacagcagcaactcggcgacttgccgtgcgccgggcgcatcgcgatagatctcggtgtaggcctcgaacgacgacaaggcacgcagcaaggcgctccattgatagtaggcgtgggccgtgccatcggtgacagcctcggcgcggtcaccggccatctcatagcgggcgtccagcaggcgcagcgtgttgtcggcccgttcgataaaagtgcccaggcggataaatcggaaagcatcgttgcgcatgatggtgccgtaagtggcaccccggaacagatgggagcgctccttgacccactcacagaaccggctcatgccataacggctgaggccctgctgggcgatatcgcgaatatccagccaggtggcgttgatgttttcccacatatccgcggtaattcgcccacgcaccgcatgggcgctggcccgcgcggcgccgagacaactgtagatgctggccgggttggccgcgtccagcgcaaaaaagtgcaacaggcgttcggcgtgcagttcgccgtgacgttcgtggtaatcgtccagggtgccggtaatcaatagcggcatggccagttcatgcaggccgtcgccgcgcccatcctggggcatcagtgacagcgaatagctgacgtcgagcatgcgtgcgaggttttccgcacgctccaggtagcgcgacatccagtacagatccgaggcagttctactcaacatggcatcagtcctcgaccacccaagtgtctttggtgccgccgccctgggacgagttcaccaccagcgaaccttcgcgcaaggccacgcgggtcaggccgccgggcactacacgggtctccttgccggacaacacaaacgggcgcaggtcgatatggcgcggcgcaatgccgttttcgacaaaggtcgggcaggtggataaacacagggtcggttgggcgatataggcgtggggcttagccttgatccgtgctcggaaggcttcgatttccgctgccgtggacgccgggcctaccaacatgccgtagccaccggagccttgggtttccttcaccaccaggtcgggcaggttggcgagtacgtgggatagctcgtccggtttacgacactggaaggtcggaacattcttcaggatcggttcttcatccaggtaaaaacggatcatctcggtgacgaaggggtacaccgacttgtcatccgccacgccggtgccgatggcattggccagcaccacattgccgcagcgataagccgcgagcaggccggacacgccgagcatggagtccgggttgaaggccaggggatcgagaaacgcatcgtcgagacgacggtagatcacgtccacggccttgggcccatcggtggtgcgcatgaaaacgcggtcatcgcgtacgaacaggtcggcgccttccaccagttccacgcccatctcgcgggcgagaaaggcatgctcgaagaacgcgctgttaaagcggcccggcgtcaataccaccacgctggggttatccagggggcttgagcttttcagcgtgtcgagcagcaggttgggatagtgatcgatgggcgcgatgcgctgggcagcgaacagttcggggaacaggcgcatcatcatcttgcggtcttcgagcatatagctgacgccgctgggtgtacgcaggttgtcttcgagcacgtagtacgtgccgtcgccatcgcgtacgaggtcgacgccggagatgtgggaatacaggtcgcggtgcaggtccaggccctgcatcgccagttggtattgctcgttggccagcacctgttcggcaggaatgatcccagccttgatgatgcgttgctcgtgatacaggtcggcgagaaacatgttcagcgccttgacccgctggatacagccacgctcgacaacccgccattcgctggcgggaatactgcgcgggatggtatcgaagggaatcaggcgctcggtgccctgctcgtccccgtagagggtgaaggtgatcccggcgcggtgaaacagcaaatcggcttcacgccggcgttgagccagcaattcaggcggggtttcggccagccagcgggcgaactcgcggtaatgcggtcggaccaggcctgccccatcgtacatttcatcgtaataagtgcggatcatgccgaactccttgtcacccgggcgaaagaaccatcgcaaggcccgtgccagcggcataaacacttaaaaatcagtgagttgaattaaccacgcaatctgctcgcaccgtcctggtgcgcagaatgcccagtgcactgccccacgcttcatcgcaatgcgggctttgactatcaacagcatagtcagagttgatttcactgcccggcgcaggctgcggataatcggccccatctgctgaactgccttcagcgctccgctcttccctttaggccacccgtatgggtggcctttttttggtgcgtaaaaatagcgcgcaagttccgagttattttcccaccgcacaaacaaaatcggccgacccaaaggccagccgatacgctgtgttgctcataaactgccgctacatgggtaacccacgcacctcctgcttcacgccccatccttcgatgatcccgcccagcggctcgaccaccgccccgaagtcttgctcgaaatctcctatgccgtcgtaggtcgcaaacatgactttgctcagttccaggtaccaggcgccatcgtcgcgcgcactcacctgggcattcagggattccccgcgaaactcacccgcagccctgcgcgcccgttcctcatccgggaaaatggcgtagaactcgatggggtgaaaacgcgagaagtcgaagccgccttctttcatgcggcgcagaacattggtgctgatgtcttcttgataggctgtgctcatgaaaagtgctcctcaaattgatggatagactttccgtgcttcccgaagcccacgccgcaatggcgtggggactacggcaacaacatcaccgctggaaaacaagcatgtagctgacaagaccagaactagcgattcattcgctgatctcgtttgcagagtagcgcgaagctatcacctccaccagaggcgcttggatggactacagggaatgttcaggcggcgggagagatgtcgaggatctggatgctgttctggtctttgaggatcttgaccgtcggctcgggcttgcggccctccagatcattgaggtccagttcggcggcgacgggcaccagcttgttgcgaatcatgtgcgcagcgtcttcgaggctgggcttgtgttcgcaggtgaactgctccacggtctgcacgccgtgatcatcaacgaaggtaatttgccacgtttgcatcggtgcctcctcgataaaacccatgtgtgggcttacacatatctggaccttgagcgctggacaaacgttccactcaaggccggaggcaccggatcagctgcagttatttttccgcgtgttgcttcaaggctttcaaggtgttgaacggagcgtccaccacgaacttgttggccagccacgagggcacgctgccgcctggctcggtatgcacctggtaggtgacttcggtcaggttgtcgcctttggggaccagtttccagaagccttcaacctgggctacgcgtacgaagcctttttcttccggctgataagtaggaacctccagcaaggtccgagtgacactgccatcggcacccttggcagtggtgattttcaggatcgaatcacgattactgacggggaacggcgcattgaactgggtgtaggtatagctgacgtcaccctcatgtttcagcagcttctgcaatttgcactcatgaatccacttgcacgcaccgactacgtcttcctgcaacgcgacgatcttcgccaccggtgccttgatcgtggtcaccccgcgatacgccttgtacttggagccggcaatttcgctcagggacaccttgataccgtcttcgtccttggcgacttgccaatcctcagcctgggcagtggcagcaaacaacaccgtaaaaccgcacaacacagccattcgtttcagcgaacccattgttgtattccttattgttgaagttccgatagtaaagcccatcaagccgccgtcatctgctcccaccagccgatcaagcggatcgcatcggcctggtcggtgccgcagacctcgagatccgccttgaaatcactgcacaccgccggtcgctccggctggccgaacagcaggcatagctgttcgaccgataggtgcaggcagcgttcgcccgccggtttgccctgtggcatgcccggtaatggcgaactgatggagggggcgatgcagcaagcgccacagccttcacggcaattcatgaccagcaggtcctcgacgactcaatgtggatggccggactagagtacgccctaaaacagccgttttaaaatgggttaacaggggtttttcgcagaaaacaaaagtgactgaccagtctgcgacagatggtcgagggcacgcgtcacgtttgtgggaaaagtttactgcttgaactcgaactccaccgcggcgccttcgacttcgcgccgttcttcgttgcgcaattgcagcttcatttcattgctgagcaggcggccgttgatctggaaggcgctgttgtcggtgggtttctcaccgaacatcggcggcagcaagggcacacttttgggtttgggcatggtaccgataggctgcaagtgcctgaccatgtccgacggcagggacaggtccaactgtgccggtggcaattgtgtctgcgtcacttcgcgggatgccttggacttgctggctgcacgttttttggcggcagcggtgggtttcttcaccgctggggcttttttaacgggagccgtttttttcgcggagggcttctgctcgttactggcggccggcttggtttcactcacaggcgctgccgccagcactgtgccgacgttgcacaggcttaacaggccaattaccagaacagcgcgaaaaatacaggtcatatcgcctacagcattaacggcagagggccatatgctcgcttgttgtgcgcggcatgacaagcacagtgattagtgtgctagaggatttgtcccctttctgagcgtcataatcctgctgctgtttcctggcataactggctcgccagcatccccaacgtcatcagcgcccgctctgcctcgcggttccacggggtgccgcagttcaggcgaatacagtggttgaactgctccgtattactgaagatcagccccggcgcaatactgatgccctgttgcagtgcgcgcacgtgcagttcctgggtattgacccttccaggcaaactgacccacaggatgaagccgcccgtcggacgggtcatctgggtgccttccgggaaatactgctgcaccgccagttgaaaggcgctgaggttcttgcggtattcctggcgaatgtagcgcaggtgccggtcgtagccgccattctccaggtaagcggcaacgcccatctgcgtgacactgcacgcggagtgggtgctgaacatctgcaggcgctggatctcctgctggtatttgccggcgatcatccagccaatgcgcacaccgggggacagcgtcttggaaaagctggagcaatagatgacccgatccaggcggtcataggctttcagcgccttggtgcggcccagttcgaacatcagctcgccgtagatatcgtcctcgacaatctggatgtcgaagtccgaggccaggcgcagtaactgtttctgccgttcctcaggcatggtgccgcccagcgggttgctcaggcgcgtggtcagcaccagggccttgatcgaccattggttggccgccagttgcagggcttccaggctcatgccggtggacgggtcgctgggaatctcgatgaccttgaggcccaacagatcggcgagttgcagcaagccgtaataggttggcgactcagcggcaatcaggtcgccaggccgcgtcagcacccgcaacgacatctgcaacgcatcgacacaaccgtgggtgatcaccacttcggacgggtccaccaccacacccgcatcgcgcatgcggatcgccacctggcggcgcaacggttcgaaaccggggctgaacatgtagctgaacgcacgcgggctctggaagcgcgtgaccttggccaattgctggtgcagggcgcgtactggcaggtagtccacgctcggcactgcagcgcccaacgggaacacaccttcgcggcgcgattcgcccaagacctgttgaatgatactgctgcgggtgaccaaccctgggcgctcgacccgtgcaatgtccggcgtcggcgccgtgagtgctggcgtctggtgcacataatagccggactgtggccgcgcccggatcagcccctggtcttccaggttggcgtaggcctgcaacaccgtggcgtggctgacgttcagctgtgagctcatcttgcgcaccgaaggcacgcgctcgcccggttgatagacaccgcgccggatatcctcagccagttgctgggcgatacgttggtaaagcaacagattggtcatgacgcagcactcgatttcacgggtattttatttttgtgtgaaacataccggcacagtttagaagtgtacggggacagttgccacaatagtcgagcgcgcgtttgagtgacagtaaaactgtgagggtgcacaccaaaaaatgtgggagggggcttgcccccgatgacggtgggtcagcgacagatttgctgactgatgcaccgctatcgggggcaagccccctcccacattcagagcggctccaggcttctatcgggcagcgcccagttggcctttctcgtcagagaagacgatttcaacgcgacggttctgcgccctgccccgctcggaggcattggcctccaccgggtactggtcgccatacccttccacctggatgcgtttttcgtcgatccccaggtcgaccagcacatcagccaccgactgcgcgcggtcgcgggacagtttgaggttttcctgctcgccgccggtgttatcggcgtagccctcgatacgcaccacacgcttggggttcagttgcaagaactgcacgatcttgagcactgtgcggttggccgagttcttcagctcggcgtcaccggtgtcgaacagcacatcgcccagggtcatcaccaggccacgatcggtctgggtggtggtcaggctggcgatctgctcttcaagccatttaccctgctgctgcacgctgctcagcttgctttcacgcagcgccagctgcaggcgctggcgctccagttcgagcttggcgccgcgctcctggttgagcgcctgttcggtgtgttcgcgggcaatcgcgctatagcgctggctcaagtaggcgtaatgcaccacgtcggcaccgctgccccagtagctggacaggcgatcggcacgggccagggactcaccggcgcggatcacgtccttgggcgcaaagcgcaacacattggcgtcttccttgaccttctggaagtcattcccggcctgttgcagggcctgttcgctgtcgggatggctggcacaaccgcccaatacagcagtgcccaacagcagcgcacagcccaaaccacggatcatcggactcattgggcttcccccaactgcaattgcttgcgcaggcgagtgatgcgggtgttgagcacgttcaactgctcctggctcttgcgggtcaacactttggcttccgccagacgcgcgtccaactcggcttgctcaaagcgcatgcgtgcatttttgtaggactggtcagccatgctcgacttggcccgggcgaatttctcttcggccagtttcagttcgggcgattcatcggggttggcgccaacagcgctggcttgctccagggcttgctgggtgaggcgaatttgttcattcggcgcaggatcagctgcacatcccgccagagcgacaacggcgagggccgcgaaaagaggtcgaagagtcactgaaaatccctactttgttggggtgccgacgggttgttgcaattgcgctttccaacgttccagattgcgctgcaatgcggcttccgtcacaccagacccgggcaattctgtcatctttttggcgagctgtccgcgcaaccacggatcgttgcaggccgagttgtgggaaatcgccaggtacaggcccggctgatcgacgggcacgtcgcgggtgatcaggtcgttgctcatgcccaaggtctgtgccattgccatgccggaataacgcccggcgaggacatagtcgacctctcccagcagcagcttctgaaacgccggcgtcagggacggcaggcgttgcaggctcaattgctggccggcgaacgtttcgaaggcggcactcaaacgcgcacgttccgacaccgcgcctttgtgcccgtgcaggtcggccgccgtggtgtaggccagcgctgaatccttgcgcgtccacactaggtagtcgagctgcaccagggccgggtggatgtagtcgagggtttccagctcgcccaggttcagcggcgcatcggcaaggatatccatgcgcccgctgcgcacctcatccagggccagcgaacgtttgccgccgtagagcaggtcgattttcaacccgaggtccttgcccacttgttgcagcacgtcggcggtggcgccgatgaggtgcgtggggtcttgcgggtcacgccagagcaggggcggcgcgtccggactgccggtgatcaccaggcggtcgcatttgccggcggccagcgtcaggctcggcagcagagtgaggcccagcagtacggcccagggacgcagttccatggcaagtgtctccagcaagtcaaaaaaaagcccggtcacatggaccgggctctttataagtgaagcgactggattagaccagcttctccaactcagggacagcttcgaacaagtccgccaccaggccgtaatcagccacctggaagatcggtgcttcttcgtccttgttgatcgcaacgatcaccttggagtctttcataccggccaagtgctggatcgcgccggagataccgacggcgatgtacagctgtggcgcaacgatcttgccggtctggccgacctgcatgtcgttgggtacgaaacctgcgtcgacggccgcgcgggaggcgccgaccgcagcgcccagcttgtcggccagggcatacaggtgcttgaagttgtcaccgttctgcatgccacggccgccggaaacgacgatcttggcagcggtcagctcaggacggtccgacttggccagctcttcgccaacaaagctggaagtgccagcgtcgtgggcagcggcgacggcttcaacggcagccgaaccaccttcagcggcaaccgggtcgaaaccggtggcgcgtacggtgatgactttgaccgaagcgttggactgtacggtagcgatagcgttgccggcatagatcgggcgcttgaaggtgtcggcgctttcgaccgagatgatctcggagatctggtcaacgtccagctgcgcggcaacgcgtggcaggatgtttttgccgttggaagtagcggcagccaggatgtggctgtagccagcgcccagttctgcaaccagaggggcaacgttttccggcaactggtgagcgtaagcggcgttgtcggccagtagtactttgctcacgcccgcgattttcgcagcggcttcagccacggcgccagcgccttggccagcaaccaatacgtggatatcaccaccgattttcgcagcggcagccacggtgttcagggtggccggggccagcaccttgttgtcgtgttcagcgattaccaagatagtcatgattagattaccttcgcttcgtttttcagtttctctaccagttcagctaccgacttgaccttgatgcccgcgctgcgtgcagccggtgcttcaactttcacggtcttgttggtagaggcggtggaaacgcccaaagcttccggagtcaacgactcaagcggcttcttcttggctttcatgatgtttggcagggacgcgtagcgcggctcgttcaaacgcaggtcggtggtgacgatggccggcagtttcaaagaaacggtctgcgcgccgccgtcgatttcacgggtgacagcaacgctgtcgccgctcacttcgaccttggaggcgaaggtgccctggccgtaaccggtcagcgcagccagcatctggccagtctggttgttgtcgctgtcgatggcctgtttgccgaggatcaccagctggggctgttccttgtcgacaacggctttgagcagcttggcaacggccagggaggtcagctcttcagcggactcgaccaggatggcgcggtcggcgcccagtgccagggcggtacgcagctgctcttgagcagtggtcgggccgatggaaaccacgacgatttcagtcgccacgcctttctctttcaggcgtacggcttcttccacggcgatttcgcagaaagggttcatcgacatcttgacgttagcgaggtcgacgccggaattgtccgccttgacgcgaactttcacgttgtaatcgacaacgcgtttgacagctacaagaaccttcatggattcctcgttactctccggtgaaaagaaagtcgcctaggcgaacctggcggttgatgctcatcggcacacaagggcacctccaaaaacgcaggcggcgaccttgctcacgggaaatgatgaccgttcgtcaggggtgactgagaggtcattctttatcgcagcgtgtaaactgcgcgccagtgtttgggcacgcgtcacctgtcttgcttttggacgtgctcttgaaacctgctgtctgcctacggtaagcgcaaaaccgaccgtatattgaccggaacgcctattctggtcaatacggcaaaatagccagtcataagccgcaccactttgatttatctagcctgcgagcaattcaaacaaacgtttgtattggacgctgccagtggtgtagatataatgcgccacctagagagaaaggtgggtcttgccgttgccgtaagacgacaccgaacctccacccattagaaaaaaaagcctgttgagccttgagtaggagatagcctgtggaacgcgaatacatggaattcgacgtggtcatcgtcggcgctggcccggcgggactgtctgccgcctgccgactgaagcagaaggccgccgaagccggtaaggaaatcagcgtctgcgtggtcgagaaaggctccgaagtcggcgcgcatatcctctccggtgccgtgttcgaaccacgcgccctgaacgaactgttcccggactggaaagaactcggtgccccgctcaataccccagtggtgcgcgacgacatctatgtactgcgcagccccgaagcctccaccaaggtgcctgacttttttgtgcccaagaccatgcacaatgaaggcaactacatcatctccctgggcaacctgtgccgctggctggcccagcaggccgagaacctgggcgtggaagtctacccaggcttcgccgcccaggaagcgctgttcgacgaaaacggcgtggtgcgcgggatcatcaccggtgacctcggcgtcgaccgcgaaggcaatcccaaagaaggcgtctacaccccaggcatggaactgcgtggcaagtacacgctgttcgccgaaggttgccgtggccatatcggcaagcagctgatccagcgcttcaacctggacagcgacgccgacgcccagcactacggcatcggcctgaaggaaatctgggaaatcgacccggccaaacatcagcctggcctggtggtgcacaccgccggttggccgctggacatcatgagcaacgagaacactggtggctcgttcctctatcacctggaaaacaaccaggtcgttgtgggcctgatcgtcgacctgtcctacagcaacactttcctgtcgccgttcgatgagttccagcgcctcaagcaccacccggtgctggcccagtacctcgaaggcggcaagcgcatcagctacggcgcgcgtgccatctgcaaaggcggcctgaactcgctgccgaagatggtcttcaagggcggcgcgctgatcggttgcgacctcggcaccctgaacttcgccaagatcaagggcagccacaccgcgatgaagtccggcatgctcgccgccgacgccgtggccgaccgcctgttcgctgactccgaaggcggtgacgaactgaccgcttacgtcgacagcttcaagtccagctggctctacgaagaactgttcgccagccgtaacttcggcccggcgatgcacaagttcggcccgatcatcggtgccggcttcaactggttcgaccagaacatcctgggcggcaagatgccgttcaccctgcacgacaccaagccggactacgcctgcctcaagctggccaaggacagcaagaagatcgactacccgaaacccgacggcaagctgagcttcgacaagctgagctcggtattcatctccggcaccaaccatgaagaagaacagccgtgccacttgaagctgaaagacgcgagcatcccgatcggcaccaacctgccgctctacgatgaaccggcgcagcgctactgcccggccggcgtgtatgaagtgatcacccaggaagacggcgaaaagcgcttccagatcaacgcccagaactgcgtgcactgcaagacctgtgacatcaaggacccttcgcagaacatcacctgggttacgccggaaggcgcgggtgggccgacttacccgaatatgtaagctcgcgactcgaacaaaaaggctcccaaatgggagccttttttatgctgcgcgctcttcgccgggattgcgcaggaagtagcgcttgtactcgcgactgaactgcgacgtactctggtaccccacgctgtgcgccgcctgcgccacacccataccgtccaccagcagcaactgttgggccttgagcagacgcagacgcttgaggtactgcaccggcgacaacaacgtgcagcgcttgaagtgctcatgaaaggtcgacgcactcatgtgcgcatacccggccagcgtctcgatattcagcggctcggcatagtgggcatgcaggtgattcaatgacgtggcgatccgcgaaaactgcccctgctgttccaccagtgctcgcaacacatcggcctgcgggccccgcagagcggtgaacaacacttcccggacccgcgccgcgcccatgatccggctttccagcggatcgtgcaggcattgcaacagccgctcgacagcaccgcgcattgcgtcatcgagcatcaccgaactcatcgactccagcgtctgcgccgtgggtggcggcccggcctgaatgcccatggccatgaccaattcgcccaggaccacgcggtcaatgcccaccgtgacaccgtacaacggcgcatcagcgcccatggcaaaggtctcgcactcgaacggcaccggcatggcctggatcaggtaatgcccggcgccatactccaacgtgcgcggccccaggtaggcgactttgctgccttgggccacgaacatcaggcttggctcatagatctgcggcccgcgtgccacgtcacaactggcgcgcagcacttgcacaccgggcaggtgggtcggggaaaaaccgtcgcagggcgtaagcccctcaatcaaggcaaccaaggtggcattggcatcgagatggcgggtcaacaacatggcaaaaaacttcgcgaataagggatgagaacatcatcgcaggtctggcggccaatggatccaaaccaggggcactcccggacgaataggcatgagactcggagcaatcgccatggccgcatcaggacccggcgcggagaatgcgccgcctcacctgtcattgcttttgcgaggtttccccatgtacaccgccatcggttatgccgcccagtcggccaccactcccctcgcccccatgtctttccagcgccgcagcccgcgcgccgatgacgtggccatcgagatcctctactgcggcgtctgccactccgacatccaccaggcgcgcaacgaatggggcatcgccgtgtacccgctgatgccgggccacgagattgtcggcaaggtcaccgccgttggcgccaacgtcaccgcgcacaaaattggcgacctggtcggcgtgggctgcatggtcgattcgtgccgtcactgcgacgcctgcaagtcagaccttgagcaatactgcctcgaaggcccgaccatgacctacgccaccccggaccgtgtagacggcagcaacaccatgggcggttactccgacagcatcgtggtcagcgagcacttcgtggtgaagatcccggccaagctcgatctggccagcgcggcgccgatcctgtgcgccggcattaccacctactcgccgctcaagcactacggcgtgaaggccggcgataaagtcggcgtgctgggcatgggtggcctgggccatatgggcatcaagttcgccaaggccatgggcgcggaagtgacgctgttcacccgctcggcgagcaaggccgaggaaggtcgtcgccagggtgccgaccatgtaatcgtgtccaccgatgccgagcagatgaaagccgccgccggccgtttcgacttcctgctggacaccatcccggtgcagcacgacctgaacccctacctcgacgtgctgcgctttgacggcgtgcatatcctggtcggcctgatcgagccggtcgacccgcccgtcaacgccgccaagctggtgctgggccgcaaagtgctggccggttccttgatcggcggcattgccgaaacccaggaagtcctggatttctgcgccgagcacaacatcacctgcgacatcgaaatgctcgacatccgccatatcaacgaagcctacagccgcatgatcgccggcgatgtgaagtaccgttttgtcatcgacatgacgaccttgaaggcctgatcaggccttcgcgcccaactccgccgacagccgggctgcgacctgtttgaccacgggaatcagctcggccattttctccaagggcatgtagggcacggtactggcgatgctgatgccggcgacgatgcgccggctggcatcgcgcaccggggccgccacgcaacggatcgacggttcgttgtcttccaggtcgaacgcatacccgcccaccacgtattcacgcatgcgctgctcgaactgcgcccaggactgttccgggtgctgcggccactgcaggcttttcccgcccaccggcaggctgacgtcgtacagacgctgccactcttccaccgtgtcatccagcagcaatgccttgccaattccggtgcgcgccagcggcatgcggtggccgactcgcgagcgcatttccgggccattgcggccggggttcttgtgcaggtaaagcacgtcatcgtattcgcgaatggccaggtggatggtgtcaccggtcaatgccgacagctcatccagatacgggatagccaaggtcaccagcggcagctcttcccgcgcctgaaaccccagctcgatcaacttcggccccagcaggtaaccgacttgcggcactacgcgcaggtaacgctcgtccaccaggcaactggccaggcggtgggtggtgctgcgggtggtgccgatgcgcttggcgatctctttcagatcccgcgcacccgccgccacggcctgcaccacgcccaggccgcgcagcagggtctgggtgccggtgggggcggtgtctttgacgggggtgtgggcgttttcctgcatatcaggcctatgtggtggtacgaaaacgagcggcattatggcaaaagctgaacctcaatacagcgcagatccaaatgtgggagggggcttgcccccgatagcggtgtgtcagtgaatgcatgtttttctgacgtgccgccatcgggggcaagccccctcccacatttgaatcttcatagggctcgggatcagcgctgtttcatgcggtcaatgatgaccgccagcaacaggatcgagccacggatgacgtattggtagaaggtgtcgatgttcttcaggttcatcgcattctcgatgatcgccaaaatcaacaccccggcaatcacatggcggatcatgccgatgccgccactcaacgacaccccgcccaacacgcacgccgagatcaccgtcagctcaaagccctgcccaatcatcggctggcccgaggtcatgcgcgaggcgaggatcaccccggccaacgcaccgatcaacccgtgcacggcaaagatgatgatcttggtgcgatcgacgttcaccccggccagcaacgccgcttcctggttaccgccgatggccatggtgttgcgcccgtaggtggtgtagttgagcagccagccgaaaaacacaaagcacagcacggtgatgatgatcggcaccggcacgcccatcaactggccgttgccgaacacgaagaaaccctcatccatcacccccaccgctttgccgttggagaagatgtaggccaggccgcgcacgatctgcatggttgccaacgtcgcgatcaaggcgttgatacgcagcttggcgatgacaataccgttgatcagccccaccaccaggcccatggccaacgccgccgacacaccgagcaccacgctgtcggtatcacggatcacgatacctgcgaccaccccggcacacgcaatcaccgagcccaccgacaagtcgaaatgcccggatgccaggcagaacaacatggtgcacgcggcgatgcccacggtggagatcgccaggcccagcccgcgcatgttcagcggtgaaaggaagttgtcgataaacaacgcgctgagcacaaagatgctcaacgcggcgagcagcatcacccagtcatcgaggaatttgcgctggttgaaacccggccagaagccctttgcagtttttacctcagacatcattcacctcgaattcttcaagcccgcgaacgcgggagagccagttgcaacagccgtgcttcatccgcctggtcacgggcgagttcgccggtcagggcgccttcgctcatcaccaggatgcggtcggaaatccccatcacttccatcaggtcgctggacaccacaatcaccgcaataccgctggccgccaggttatggatgatctggtagatctccgacttggcaccaatatcgatgccacgcgttggctcatccagcagcagtactttcatcggcatcgacaaccagcggccgagaatggccttctgctggttgccgccggacaggtacatgattttctgttcggcgttcggcgtcttgaccttcatgcttttgatttgccggtctgcgttggccttttcccagccatcacgcagcagccagccaaatgcagagtgggcgccacgcgcgctgatattgatattttcggcgacgctggacagcggaatgatgccttccttcttgcggtcttccgggcacagcagtacgccggcggcgatggcatcgcgcggtgaacgcagttgcagggcctgaccgcacagttccaggctgccggcagtgctgcgggtcaaaccactcagcagccgaaacagctccgtgcgccctgccccgaccaagccgaacaggccgagaatctcgcccttgtgtacctgaaggctgaccggctcacgcaagcccgggccaagcaagccctcgaccttcagcgctacatcgccctgttcacgtgggcggtagtcgtagatgtcctggatatcgcggccgaccatgcacgttaccaactggtcgtgggtcagggtgctcatgtcgtcgaaggtgcgcacgtaacggccgtccttgaacaccgttaccgcgttgcagatgcggaacacttcctccatgcgatgggacacgtagagcaccactttgccttcatcgcgcagccgcgtgatgatcgccatcaagcgatcgatctcccgcgccgacaggctgctggtgggctcgtcgaaggcaatcacatgggcgccacgggacagcgccttggcgatttccaccagttggcgttgaccaagggaaagtcgaccgagcttctcatccggatcgatttcatccgccaggcccttgaggcaggccaacgcctgcttacgcaactgactgcggttgaccaccccgaagcgcgtcggcaagtgcccaaggaacaggttctcggccacggtcatttccggcaccaagtgcagctcctggtggatcaccgccacgccgttggcaatgctgtcggcggcagacttgaagtccatggtctgcgcgccgatctgcaacgtgccactgctgggcaggtaggcgccgccaaggattttcagcagcgtcgacttgcccgcgccgttctcgcccatcaacgcatgcacctcacgcggccgcgcttcaaagctgatctgcgccagggctttcacaccgggaaactccttgccgatgccgttgaagcgcaaggccgcgccggtcatttccacaacccgatcttggtcagctctgcctggaagttggcgcgggtgatcagggtcacttcgtccatcgccgtgtatttcgcaggttccttgccggtggtgacccactcatacatcgccaacgcggtgttgtaaccctcgatatgcgggctgggcagcatcgagccgaagaaaccgctttcagcctttttcaactcgccgatggcgtcggtgccattgatgccgatgccgatcacattggcagccttgaagccggcgctttcggtggcgcgtacgccgccgagcacggtgttgtcattcatgccgccgatgatcaggtttttcgcgccgctgggcagcttgaccagcgccgagttggtggcgtccatgctgccgggtacgtcaagggtcttgagcgcggcggtcaggatatggtctttgggcaggccggcgtcttccagggacttgatcgaaccgtcggtgcgcttcttgccggtgtcgagttcgttataggtgttgatcacggcgtaggtgtccttccagtcccagccgcgttttttcgcttcggttgccattgcggcgccctgcttctggcccacttcaaaggcagccatgcccaggtacggcacgtcttccatgaagttgcccttcgcatccacgaagcgatcatccactgccatgactttcaggccattgaccttggccttggcgacgatggccgggccgagggacacgtccggcgggcagatcacaaagcccttggcgccgttggcagccaggctgtcgatggccgagagggttttttcaccgtcgggcacggcgatcttgatcacggtaaagccgtgttccttgccggctttctcggcgaaggcccattcggtctggaaccagggttcttcggcctgtttgaccagaaagccgatcttcacttcttcggcgagtgccacgctgctgaacgccattgcaagtgccagggtgcctaaagtcttcttgaacatgaaccacctctttcttgttattggaaaacgcttcagtcgtggtacatcactgaccgcccgccatcgatcatcaggcaggttgcattgataaacggcgcctcgtcggtcgccaggaacaacgcggtcatcgccacttcgatcggctggccgatgcgcttgggcgggtgcaggtcgaacgcacgctggcgttcggcgtgggggtcggggaaaccgttccagtagtcgacgttgagctgggtttctatgtagcccggcgcgatggcattcacgcggatgcccttgggcgcgtattcgatgccgagggcgcgggtcaggccaagcaggccatgcttggccacgggataggggaagcagccaggaatgatgtggctggaatgggtggaagcaatgttgatgatattgccgatgccctgctcgatcatgtgcggcagcaccgtgcggcagccgtaccaggcaccgtcgaggtcgatggcgaagcagcggcgccagtcttcgtcggtcatctccagcgggtcgcgaaacacattgaccccggcgcaattgaccagcacatccacccggccgaagcgctcgatggccacattgaccagtgcctgccattgttccttggacgtgatatcgacggattgcgcgtagatcttggcgccgtgttcgcgccagcgggccgcgacctgctcgaccttttcgccctggatatcagcgatgatcagcttcgcctgctgcgcctggaaacacgcgacgatcgcctcgccaatgccttgggcggcaccggtgatgatcaccactttgcctttgagccgctcgccgtaggtgggttcgggcacggcggggagtgacaacggttgtgcctgcatcgcttcacctgttttatttttggtagtgagtgctgatgcagccgactataaacccatcttttgaaacatctcaatatataaatttgcatcccatatattgagaaaagagcaaaaaaattgtgggagggggcaagccccctcccacattttgatctacggtctttagcctagggcgaagtcacgcagcgcatcaccttccatgcgatagcgcacccactcctcctgcggctgggcaccgatggatttgtagaacgcaatcgccggttcgttccagtccagcacgctccactcgaagcgcccgcagccgttgtcgaacgcgatcttcgctaggtggcgcaagagcttcttgcccgcgccgccgccgcgttgctccgggttgatgtacaggtcttccaggtacaggcagttgctgcccagccaagtggaataactgaagaagaacaccgcaaaaccaatcggcaggccatcgcgcaaacagatcaggccatgggcggtcgccccttcgctgaacaggctacgctcgatgtccaccacactggcgatcacttcatgccgggccttctcgtactcggccaactcagtgatgaaagtcaggatctgcgcagcatcgctgggcacggcggggcgaatctcgatggtcatgggcgagccttggcaatttcaaagcacacatactaaggcgctttcgtgacgagttgcagcgcaattcgtggtcactggcacacaaaatcttacaggtgacgcaagaccgttcgtcgccacccaggcacgaacatcaaacgagagctgaccaacagtaggtaaggacattcatcatatggagacaccctcatgaagcattccaagtttgctgccctcgccctggctggcctgttgtcttcggtttcgctgagcggttttgcggccacctcctccaccggcccgaccaacccggacgccaccaccgagtcccagaaatccatgggcaccggcctggacaccaatggcggcgcagtcattgacaataccaatgccgctgacccgcacacccagggccatgacacccaacgccaggcaccagctgccgtcggcaacggcaaaatgggcccatcggtcaatgaacccaagatcaacaagggcgatgactcgaacctgcccggcgcgccaaaacagcctgcgccttgatccacccaacgcaagacgaacacccgatcatttcccagtgaagaggtacgcatgaacgtcgacaaagaccttgagaaagaagtcttgacccgcctgctgcacgctcatccccaggggctgggcaaggaggtgttggataactaccgcggagaaaaagtcgtcgccagtgcgttggcgtttctgcaggatcgcggcctgatcaaggatgggcatgtgaccaccgacgccgccggtgaatatgcgttgaacctgccgatcaagctgacggcgtcgggtgtggatgaggcgcgtaagttggagtctgaaaccagccagtagcctcaaatgtgggagggggctttcccgctcccacattttttgacacggcctattcccggagaaaggcgtcgacttctgcgctgccaggcgatgtagccggcccccagcgagtcaccgccagcgccgctgccgcgttcgcccggcgtgcagcctgggcaggtgccaggccatcggccaaccctgcgataaacaccccggcatgggcatccccagcgccattgctgtccaccgccgtcaccttcaaccccggcacatgctcggcctggccattgcggctcacccagcagccattcggcccatcccgcaccaccagcaaggcatcgccgggcagatgacgattcaagtcgaccagcgcctctgcaaccgtttccgccccggtaaacgccagtgcttcagggccattactggtccagatatcgatacgcggcaacagcgccaccatcagcgccgaatccggtgccttcaccaacggacccgggtcgaacaccaccttgatagcgcgaggcagcgccagcaaccagtcgagcagagcctgcgccttgccttccagcaacaggctgtagccactcacatacacgtaatcgtccggctgcgggaccacgcgcgccaggtcctcggcgctcaactcgccttcagcaccgatatgggaaatgaaggtgcgttcggtggtggcctcggtcagcgacacacacaaaccggtatctttatccgtgctggccgcttgggcaatctcgacaccttccgcctgcatcgccgcgcgtgccaggtcgccgaaacgcccgttgccgtgacggcccaggtagaccaccgccagcccattgcgccgtgcggccgccatcacattgaagccaccgccggcttcgaaactggccgattgcgccagcacgtcgccaccggttgcgggcaaggtatcgagggccatgaccaggtcgacgatgacctggccggtgtgcagcaatctagacattagggctctctactaaagccgggcgacgatcagccgcaccgcccagtactgcataaatcccgccggccaccagaaaggtgacgatccagcccaggccgttgtggcccagccaggagtcggacaaaggcccggcgaaccagatgttctcggcggtggtgccgatggcggtgaagctgaaacccagcacgatcgccacggcccaggcaccgaaggcacgccactccacaccgccgcgataccagtaggcgctgcttgggctcacgtccagcaggtccttggcgctgtagtagtgacggtggatcaggtcgaccacgaagatgccgacccatgccgtgatcggcaccgccagcaaagaaatgaacgtgatgaacgggccgtagaaactgtcggcgatcagcatgaagtaaatcgaaccggcgaagatcgccacgatatcgacgatcaccgcatgcacgcgcttgaccttcaaaccgagggtcagggtggtgaggcccgccgagtacaccgataggttgttggacagcagtaacccgccgaacgcggtgatcaggtacggcacggccatccaggtcggcaacatatcgcggatcgcgatgatcgggtcggtcgccgacgccaggtcattgttgcccaccgacagcaggccgccgagggtgatcaacagcaccagcggaatgcccgcaccgaacgccgccgacgccaccaggcgcacggccttgacgctgcggtgctggtagcgcgacatatccgcgccggcgttggcccagccgataccggtgccggccgccatggtgccgacgccgatgatcatcgcgctcagcggtgccggggtggcgttgaacaccgcgctccaatcgatggtggcgcagaggaaaccgccgaccaggatgttcaacgcgccgaacacataggtggcccacttctggatcaccagcaaggtggcgtggcccaggccggacaccgacaaggtcaacagcacgaagatggcgatgaagaccagggtgagcaccggcgcgcttttggcttcgaccggcgaaccgaacaggatcgagcacaacgacagcagcacaaaggcggcggtagtggtgttgacggtttcccagcccaggcgcgacatcagcgacaccagggtcggcccgatattgccgcgcacgccgaagatggcgcgggacagggtcaggctgggcgcacggccacgacggccggcgatagaaatgatgcccaccaccgcaaaggagccggcggcgccgaggatcgcaacgatgatggcctgccagatcgccaggccgcgaaacgcgaccagggtggcgccgagcggcaagccgaggatgctgatattggccgcgaaccacacccagaacagttgcagcgggtggccattgcactcgccttcaggaaccggttcgatgccgcgtgtttccaattgcccggcgctttggccggaagatgtgctgctcatgagagggtgctccaagtgcctgtattgttgtggttgtggcaggtatacaaagcgaatcttccggtcgtcctgactcagcgcattttcaacaattcttcaaccagcgactgcagatccaggccattgacctgcttgacctgttcgatcagcgcctcaggccagcactgcatgcccaggcacgcaccgagcatggcgccgagaatcgcggcgatggtgtcagtgtcaccgccaagactggccgccaggcacagcgcctcgaaagcactcatctcgcccaccgccacttgctgggccagggcgaacgacaccaccaccgactcctgggacgcgacggaggtgccgatcaattcgtacagcaggtcggcgaacagggccttgtcgccgctgccgacgctcaaggtccgcgcccagctgatgcgcgtggacatccgcccacccgcgatccagtgaccatggccttcggcctgctgggcaacctgggtgccgatgttcaacgcttcgcccaggtccacaccgttgattccggctgataccaccgccgccaccgccgccgcgctggaaatacccagggtggtgttatgggtgacctggcaggcctggattaccgcctggataaactgcgccgggtcgctgacatcggcggcaatccccactggcgtgatgcgcatcgcggcgccgttggtggtgccgtaacgtccggattcttccggggtgtggccggcgaggatcatgtcgatcgcacgcttggtggaggggccgagcaaatcctgggaacccttggcgcgcatcaccgcttcccagtcgatcaggcgctgggcaagcacagtgggttcgatcttgcctcggccttgcacgagtaactcacccaccaggatggcctgttcggtgtcatcggtgatggagccggcgggcatgttaggtgcgatgggctggtcggcgtcggcgtgttccaggccggtgatggcaccgaaacgcgcgcgcacctgttcgcggctcagggactgggtcggcatgcccagggcatcgcccaaggccaagccgtagaaggcgccgagggcgcgattgagcggggtcatttcgagtttccaaattgcaggtgcaggcgaaagtgcagaggatcgagcaagctttcgacgtactccatgaaacgctcgcgacggtcgtaggtggtgcgcgaggccttgaggaacaccgtgccggctgggcggccaagcaactcggcatcttcatcgctgaggggctctgcaccgatccattggtcgccttcggcgccgacataaccgtaggcagccagggtaatggtcagggaatcatcgatcaggccgactctcggcaggccctccaggcctccggaagcgggcatcagcgagcgttccagggacacggcagtgccgtcagtggtgcgacggcgacggtcgagggcaatgaattggtcgctgccaaaacggctgaacaggtccgggcgggtcaccgcttccaggcgcaggatatcggtgttgaccttcgcaccggtgtccgccagggcttgggcccagccactgcgctggtcgagcaccatgccgtcaaaagtgacgatggagccgacgccgctctgggtcgcaatgtagttacgccgcttgagttcagcgagggcctcacgcagggtgccgcggctgaccgcgaactcttcggccaactgatgctcgcccggcagcaggaaaccgtcggccatcaccccaccctcgatacggcggatgagttcgtcgacgacgcgttttttcttatcaaatcgaacatgtctaatcatgtacaaattgataacgcaaagcgcccatgtgcagcaagcgaattatttcagggagatgataaaaccggcctcagggctccaggccaatagggaaaaactcccctgcgctccagacgcccagccagttctgaccgttgatcggacggctcactgccaactccaccaattggtagaacgcattgcggtgcaccagggcttcgaggttgctgcgcactcgcagatagggagcaggctcctgggtcacagggtcgatcaccacccgcagcgggtgttcgaggccggcttcgacctggtcatcgacattggtggtgaagcgcagcacctggctttcgccctgcccttcgacttccagggtaatggcgacaaacggcgcatcatcgacggtgatgccgactttttctacaggcgtaatcaggaagtaatcatcgccgtcgcggcggatgatgttggagaacagcttgaccatcggcatgcgcccgatcggcgtgccctggtagaaccaggtgccatcacgggcgatgcgcatgtcgatgttgccgcagaagtccgggttccacaggtgcaccggcgccggtcccttgcctttgggcagttgggccaacaggtcgttggccttggcggaatcggtcatggggttctcctgggtcttatggattgctcatccccaacaggccacgggcgtactgcgccagggggcgggcaatcaggtcttgtggcttgttgtcgtgaaacgtcagtaaaccgccacgactgcgtatacgtgcagtatcaatcaaatactgggtgctggtctcgatcaacatgatctggatgacgccgctgtccaggcctacgcggtcgagggcttcctggtcggcccattcatccgcgttgccgatgcggtcatccgccttggcgaaacggcagtacagcaggtagtgagcccccgccgcacgggcttcggccatggcctgctccagtccttcgggttgacgggcgcggcgcaccatggggaagtactcgacaaaaccattgaaggcttcttcggccaccacgttcggccgcggataggcactgcccggcggcacaaaggcgccctgggcgataaagacgaaggagtccggctgtatgcgtaccgaggcggtacggcgggtatcgctgtggtcgagcaaaccggcgtcgctcatctgatagcgggtgccttcggccatatcgctgacggtcatgcagccactcagcgtcaacgacgccagcaacaaaaccagactacgcatcctaatcctccagaagccggtgacggaaaaccggcgaatgggcgtgtgatgcaggttctgcgccatttggtagcaacctacaacaaatgtgggagggggcttgcccccgatannnnnnnnnnnnnnnnnnnnnnnnnnnnnnnnnnnnnnntatcgggggcaagccccctcccacatttggttttgtgctgtctgagcgggttggttagccgccgatgatcttcatgatggttgcaccgcccgagaaggccacttcctgtttgtcgcccagggctttcatcaacaggccttgcaacgccggcagcgcttgatggcgcggcttgtccagcaggtcgccgacgtagtggcggttactcgacgacaggcagccatgcagccagccagtggacgacaagcgcaaccgcgagcaggtgcggcagaacggcacgctttcgttggcgatcacaccaaagaaacccttgcccggcacttcgtagcgtacggccgtggcgtccacgggggcgttggcttgcaggtattcatactgttcgccgatcaggcccagcagttgttgcaggctgacaaactgctgcaggaaggcgttggagtccttggccaagtggcccatgcgcatcaactcgataaagcgcaactcgtagccacgctccaggcagtagtcgagcagcggcatgacctggtcgaggttctggccgcgtaacggcaccatattgaccttgatcttgatcccggcagcgcgggcctggtccatgccgtcaagcaccgtggccaggtcgccaccacgggcgatactacggaaggcatccgcatccagggtgtcgagggacacgttgatgcgcttgatcccggcttccaccagcagcggcagcttgcgcgccagcagttggccgttggtggtcaggctgatatcgctgagacccatcccccccacggcgcccatgaaagcttccagcttggggctgaccagcggctcaccgccggtgatgcgcaggcggtcgatgcccgccgcttcgatcaggtattccacaccacgggccatagcctcggccgagagttcgtcctgggcagccaccagccgcttgccgttgggcacgcagtaggtacacgcgtaattgcaggctgaggtcaggctgatccgcaaattgcgaaaacgcctgccttgacgatcaacgatcatggatcactccggcagaggatgaatcgggcgcgctaaaagctgactgataaatcagcttttagcaagcgtccttgcctgagtatattcctggggtactgcgcgtggcagcaaatcattacgtggcaggcgtttgggccggcgccgcttcaatcgccggcggctcactgctgtgcttgcgcttgttgcccatgcgcacgccgatatccatcaaaaactggaagaaaccttcctgatcttccagcacgttgctccagaacggcgagtggtacagcgccacggcaccgtgcaccagggcccaggcggcgcagtagtggaaatacggcggcacatcttcaagcttgccttcactgatacggcccttgatcagcagggtcaggcgttcgaagttcgaggcgcggatcttgtgcagttcctcgaccatctccggcacctgatggcccttgaccaccttctcttccagccggtcgaacaggcgatagcgctgcgggtcacgcatgcggaactcgaagtaggcacgggacagggcttccttgtccttgtcgacgtcggccgaatgcagcagctcgttcaagtcgcgctcgtagtcgagcataaggcgcaggtagatctcggccttggacttgaagtgcttgtagatcgtgcctttgccgatacccacggcatccgcgatcatctcgacggtgacgctgtcttcaccttgttcaagaaacagcttgagtgcggtgtcgagaatttcctgctcacggcggcgaaactcacggaccttacggggttctttgtgcatgaggaagaggtctgcaaaggtcggattagggagggttgcgcagggccacggatacgtggcgatacgatttacccggtgcgagggattatcccgactgaacggtcgttgggcaatgtctatgtgaacccgtaacgcactttactttcagcgcgccaacgttttcattgatatcagtcagaaataatacgcaacaactacacccgtacaccggactgatgagaactcaagcgaagcgcgcgtattccaaatctgtttaaaaaacgatcagtcgcgactggactgaatcggatactgatcaatacttgaactgtcggcgtgacatctcccccaagtgaagcgccgacctgggtaccaacggaccgcgtacccttgttttactcctaatggtcttaacccggattcaccccccagaacccgggttttttttgcctgcgatttgaccttcgcgttaagaggcgacgtgggccagcgggaacaggcgcttgaagttttcggtggtctgctcggcaaaacgctcgtaggactcaccgcgcagcatcgccaggtaatccgccacgtcgcgcacatactccggcaggttcggcttgccgcgatgggggataggcgccaggtacggcgaatcggtttccaccagcaggcgatcggcgggcacttggcgtgcgacatcacgcagggcgtcggcgttgcggaaggtgacgatacccgacagggaaatatagaaccccaggtccagcgccgccttggccatgtcccagtcttcagtgaagcaatgcaacacgccggcctggggcaatgctgcttcgcgtagcagggtcagggtgtcggcacgggcgccacgggtgtggacgatcaccggtttaccggtctgccgggcggcttgcaggtgcaggcggaacgaagcctgctgcaactcggcggcttcgggttcgtagtggtaatccaggccggtctcgccgatggccaccacgcgcgggtgattgagctcacccagcagccagtcgagtgccggggcttcaccgggcttgaggtccagcgggtggatacccaccgagcaatccacatcggcataacgctcggccagggctttgacgtccgccgcattctccgcgctgacgccgatgcacaggaagtgccctaccccacgctggcgggcggcgtcgagggcagcgtcaagggagccgccgtgctgggccaggtcgagacgatcaaggtggcagtgggaatctacaatcataggcatctacaacttcagtcacgaaaagtgtctggccgacgatacacccgccggccacggaaattaacggcgtccgagcaaaccgacccactgcaccagcaacgcttcgagcagcagcacgcggttgaggttggccttgccgagcaccttctggcgctgggcgaggatccagtcctgaatcgtcagcaccttgtcctgggcacttttctgcgccaggtattgcaccaccttgcgcatatccggcaggcccaggccgttttcatcctgggtcagctggtagcgcaagatcaggctcgaccaatcgcagaaccagtcgaacagcaacagcagggggatgtccttccaggcgttttctgccaactgggtggcggacacttcctgcttgatcagtttcttgaccccctccaccaccagcgcacgttgttcacgcacgccctgggcctgcagcttcacggcggccaacggcgaaccggcggccagggtcagcagctcgacccgttcctcctgggagcactccggcaacgcctgcgccagccacgcaaggctcatggcctcgcttggcagcgggcaggcctgctgcacgcagcggctgcggatggtgggcaacaaccggctcgattggtggctgaccaacaacagcacggtatcgccggacggctcctccaggcttttgagcaaggcgttggcagcattgacgttcatcgcctccaccggctcgatcagcaccaccttgcgcccgcccatctgtgcggtctgcaccacgaagctgaccaggtcgcgcacctggtcgaccttgattgccttgtcggcctcttcgggctccagcaggtagttatccgggtggctgccggccttgagcagcaggcaggatttgcactcgccgcaggcttcaagcttgaccgggcgctggcacagcaggctggccatcaggcgctcggccaacgctcgcttgccgatccccaccggcccatgcaataggtaggcgtgggcgtgctgggcacggccggccagttgttgccacaggctgtcctgccacgggtaggcttcagccacgggcgcgctccagcagtttgggtagcagcgcgtcgatggcttgctgcacctgcgccagcggttgggctgcatccagcagggaataccgcgcgggctcagccttggcccgtgtgaggaatgcactgcgtaccgcgttgaagaacccatcgccttccagttcgaagcggtccagacggccacgagcactggcgcgggccatgccgacttccaccggcagatcgaacagcagggtcaggtcagggcgcaagtcgccctggacaaaggtttccagggtggcgatgcgctccacggacaagccccgaccgccgccctggtaggcataggtggaatcggtgaaccgatcgcagatcaccacggcaccacgggccagggctggacggatcacctcggcaatgtgctgggcacgggcggcgaacaccagcagcagctcggtgtccgggttcatctgctcgtcacccggcgccagcagcacttcgcggatacgctcggccagcggcgtgccaccgggctcgcgggtcaacaccacctcgatgccttcgctgcgcaagcgctcggccagataatcgcggttggtgcttttgccggcgccttcggggccttccagggtaataaacaagccagtcacaggcagtccttagtcagaattattgcgggctttgcggcgcgggttcagctggcgtatcagcaggcacatccgccggtggtgttgcgtcttcggcaggcttcaccaccggcgccgggctggagcggtaatcggcgcgccgcttgagttggaactcacgcacggcggcattatgcgcatccaggttatcggagaaaatgtggctgccgtcgccacgggcgacgaaatacaggctgctgcccggcaccgggttcagcgcggcatggatcgcctcgcggccgaccatggcgatgggcgtcggcggcaggccggcaaccatgtaggtgttgtaggggttggcttccttgaggtgcgcgcgggtcaacttgccgttgtagcgctcgcccaggccgtagatcaccgtcgggtcggtctgcagcaacatgccgatcttcaggcgccgtacaaataccccggcaatctgcccacgctcttcaggcacgcctgtctctttctccaccagggaggccatgatcagcgcttggtaagggtcggtgtaaggcgcgtcggcagcgcgcttgctccactcctgggcgagcacgtcgtccaggcggttgtaggctttcttcaggaattcgacgtcggtcataccgcgcacgaaacggtaggtatcggggaagaaccgcccttctggaaacacgccagggtgaccgagcttctccatgacttcgctgtcactcaggcccgagagggtctgcacgatcttttcatgcttggccagcgccgagcgtacctggcggaagttccagccctcaaccagagtcaggctgtattgcaccacttcgccacgctgccacaggccgatcaggccctgcgccgtcatgccgggcgtcatgcggtattcgccgctgtgcaatggctggccgtccaggttgaagcgccagtacaggcgcaaccagaaggcaccgtccagtacgccgtcagcttccaggcgattgaaggtgccggtgggggtcgcccctgccggtacgtcgagcaattgctcctgggtcaggttcaagggctgcttcagggcagcgtcgtatttccaggcgccatagcccaacagcaaagccgccgagaacagaccgaccagcagcagtacaaccagttttcgtatcaactcagatttccaatagcgcgcgaacaatgccctgcagtttacgggtgagcgggccaaccgaccagctcatcgcagcgcactcgcgcaccggccaaatgccataaacgctgttacacacgaagacttcgtcggcttgctgcaactgctcaatactgatgtcggccacggccaccgggacgcccagggtctgtgcctgggccagaatctcggcacgcatcaccccggccacgccgcaacgcgtcagatcagcggttagtaacaagccattgcgcaccaggaacaggttgctgaatacgccttcgatcacgcgaccggacacatccagcatcaacccttcagcgtgctcggcgtcctgccattcggcacgggcgatcacctgttccaggcgattgaggtgcttgagaccggccagcaacggctgttcggccaagcgggtggcacagggaaacaggcggatgccatcggttccatgagcgctgggataagtagcaggcgggctgccctgcaagatacggcgcaccggtgcgccagggttgatgccataaccgcgcaggctgtcgccacgggtcaggatcaatttgaggacaccctcgccaagggcggtggcgtaggccagcacttcgctgcggatcaacaccggatccgcaaccaaggcgaggcgcctgcaaccctcgtcgaggcgttgcaggtgacggtcgagcagcaccggctgcccggcctttacggcgatggtctcgaacaacccatcgccatacgccaggccgcgatctttcaggggcacgctgtccgctggctgaccgtcgacccagctgtgcatcactcggcgaaccggcggaacaccagggaaccgttggtgccgccaaaaccgaacgaattggagatcaccacgtcgatcggcatcggctgcgcttcgtgtggcacgaagttcaggtcgcagccttcgtcaggctcatccaggttgatggtcggcggcgcgacctgatccttgatggccatcacactgaagatcgcctcgaccgcgcccgccgcacccaacaggtgaccggtcatggacttggtagagctgaccgccagcttgtaggcgtgctcgccgaataccgactttatggcctcggcttccgccagatcgcccgtcggagtcgaagtaccatgggcgttgatgtactgcacctggtccgcattgaccttcgcatcgcgcagggcgttggtgatgcaacgcgcagcaccggcaccgtcggacggcggcgaggtcatgtggtaggcgtcaccgctcatgccaaagccaatcagctcggcgtagatagtggcaccacgcgccttggcgtgttccaactcttccagcaccagggcgccggcaccgtcggagagtacaaagccatcacggcctttgtcccatggacggctggcgcgggtcggctcgtcgttacgcgtcgacagcgcacgggacgcgccgaagccgcccatgccgaggccgcacgccgccatctcggcgcccccggcgatcatcacgtcggcttcgtcataggcgatattgcgcgccgccatgccaatgcaatgcgtgccggtggtgcacgccgtggcgatggcgtagttaggtccctgtgcgcccaggtggatggacaggaaaccggaaatcatattgatgatcgagcccgggacgaagaacggtgaaattcgacgggggccggaatcgtgcaacgtgcggctggtttcttcgatattggtcaaaccgccaatacccgaacccatggccacgccgatacgatcacggttggcgtcggtgacttccaggccggcattgcgtaccgcctgaaaaccggctgccaggccgtattgaatgaacaggtcgagtttgcgggattccttgaccgagagatattcctcgacattgaaaccctttaccgagccgccaaaacgggtggaataggcagaaaggtccgtgtgttcgatcagaccaataccactgcggccagccagaatgccctgccaactgcttggcacatccgtgcccagtggcgacaacatacccataccggtgactacgacgcgtctacgcgacacagcactctcctttttctaatgacgacacttttgcttcagcgcgtacttttcatcagggctaaagaaaaaaccgcacgccgttacagcagtgcggtttttccctgacagcaagcgacgactacaaactattacgcctggtggctagtaacgtagtcgatagcagcttgaacagtagtgattttttcagcttcttcgtccgggatttcggtctcgaattcctcttccagagccatcaccagctcaacggtgtcaagggaatcggcacccaggtcttctacgaaggaagcagtgttgaccacttcttcttctttaacgcccagttgctcggcgacgattttcttgacgcgctcttcgatggtgctcataccttgtttaactcctaatggacaaattcaggcagctggccagtgggtaagtgtatagaaagccttttcagcttttcaactgaaagcttcaccctgtacccggtcggccacctgcctataaattaagttgcagctttataacggattttagacagctcgtatgacatatttttgaagcgatccgtcacaatttaactcatgtacatcccgccgttcaccgggattgtagccccagtcacgtatgccgcaccgtcggatgccaggaaagtgaccacattcgcgatctcttgagcctgacccagacggcccagcggaatctgcgtcagcaacgcttcacgctgtgcttccggcagttcgcgggtcatatcggtgtcgatgaacccaggggccaccgagttgaccgtaatcgaccgcgagccgacttcacgagccaatgcacggctgaaaccttccagaccggccttggcggctgcgtagtttacttggcctgcgttgcccatggcacccactacggagccaatattgataattcggccccaacgcgccttggtcatgccgcgcaaaacgcccttggacaggcgaaacagactgttcaagttggtgtcgaccacgtcgtaccactcgtcgtctttcatgcgcatcatcaggttgtcacgggtgatgccggcgttattcaccagaatcgccggcgcgccgaactgtgcggtgatctcggccagtacggcagccacggactcatcgctggtcacgttcagctcaaggccggtgccttgcacgccgttttccttcagggtcgcggcgatacgctcggcgcccgaggcggaagtggcggtgccgatcacaacggcgccctgacggcccagctccagggcgatcgcctggccaatgccacggcttgcgccggtgaccagtgcaactttaccttgcagactcatgcaggcttctcctacgttcagggattcaggccagtgccgcgcgagcggcagcaaaggcgtcaggggtattgaggttggcagtcgacacgccgtcggcgcagcgcttgttcaggccggccaggactttgcccggaccacactcaaccagctcagtcgcaccattggcggccagggtctggaccgattcaacccagcgtaccggcttgtagagctgttccagcaggtcgctcttgagggtatcgaggtcagcagccacggcggcgctgacgttctgcaccagcgggatctgcggcgcctgccagttgatggcggcgatggactcggcaaaacgctcggcagccgggcgcatcagctcgcagtgcgacggtacgctcaccggcaacggcaacgcgcgcttggcaccacgggccttgcagccttcgatggcacgctcaacggcagccttggcaccggcaatcaccacctggccaggggagttgaagtttaccgcgctgaccacttcgccctgggccgcttcggcacaggcctcgatcaccacagcgtcgtccaggcccaggattgcggccatgccgccctgcccggccggaacggcttcttgcatcaattggccgcgacgctccaccagcttgaccgcctcacccaaggtcaggctacccgccgcaaccagggcgctgtattcgcccaggctgtggccggcgacgaatgcagggcgtgcgccgccttccgccagccacaagcgccacagggcgatcgaagcggtcaggatggccggctgggttttatcggtttgattgagttgctcttccggcccttgttgggtcagtgcccacaggtcgtaacccagggcgtcggaagcttccttgaaggtgtccagaatcagcgggtattgcgcgctcagctcggccaacatgccgagggactgcgaaccctgccctggaaagacgaatgcgagggatgtagacatgtaacaagcccctaatgatctggtcgtcaaaaaagcgcactcctacagtgggagcgcacgaaactgacagattggatggtcaattgaactggccggtcacatttaagcactcccgggccgattcgcctaaggcaacaggtcctcgagacggccatgcaagcgttgcggcaggttttcctgaatctcgatcacagcccgcgcgatcgcactttgaaacccctcgacaccggccgagccgtggctttttactacaatgccctgcaaccccagaaaactcgcgccattatgccgtgccggggccaggtccgcctgcaggcggcgcatcagcggcagcgccagggcaccaaccaggcgcgacgccaagctctgcttgaacagcgcttcgatacgcgtggcgatcatggtcgccaggccttcgctggatttgagcaggatattgccgacaaacccgtcacacaccaccacgtccgcttcgccacggtacaagccgtcaccttcgacaaacccgacgtaattcaacccccgcgcgccttgcagcaacgtggcggccagcttgacctgctggttgcccttgatgtcttcggtgccgatattcagcaaggccacccgtggccgggccacgcccagcgcttcggcggccaccgagcccatcacggcaaactggagcagatgctcggcgctgcaatcgacgtttgcgcccaggtccagcaactggcaatagcctttctgcgtcggaatcgccgccaccatcgcgggccggtcaatgccgggcagcgtcttgagcacaaaccgcgacaacgccatcagggccccggtattgccggcgctgacacaggcttgcaccttgccatcacgcagcagctccagggccacccgcatcgaagagtcaggcttgccacgcagggcggccgccggcttttcatccatggtgatggtttcgctggctggcgtaatcgtcaggcgcgcgcgatccaccgccggatggctggcaatcagttcttcaagtaaggagggttgaccgacaagggtcaggtgcagcgagggtgttgcagacaggctggcaatgcaggcctgaacaatgctgcggggaccgaagtccccgcccattgcgtctatcgcgatgactagagcagacaagtgattactcgtcagcgcccttgtcgatcactttacggccacggtatacgccttctggcgatacgtggtgacgcaggtgaacttcaccggtggtcttttccacggacagggtgctagcctcgagagcgtcgtgcgaacggcgcatgtcacgggcggagcgggattttttgttctgctgaacagccataattgattaactcctaaacgtttgggtcacgctttaactgcgccaatacactgaacgggttggaccgcgttacctcgtcctcgctcggttcgggctcgtcatcgaggcccgccggctgctggcattcttccggatgatgagcaggcacaatgggcaaggcgagcagaagctcctcctcgatcagtgcatgcagatccaaaggatcttcgcccagttccagcacgtcataacctttcggcaacgactgggtattcgcaccctccttcaccacagcataactgcactcgctgtggatcggcagggtgaccagctcaagacaacgctggcaaaccattttgacctcggtgtcgataaaactgtggattaccacagatttacgttcatctcgttcaaaaacgaatttggcctgcaccgtaccgacagtgtcggaaagcgggtcgcagagtctctccaaatcggccagcagcaactcaccttgaagggaagtgccacgatcagccaatttgcgcgggtcaacgtgaggtggaatcgggtcattcaacataggcgcagcattatagggatgcacccagccatgtcaaaggaaattcagccctgtgcgtcagccggtcgccccgctagaatccgctgccgacctgaggagacgcccatgctgcccttattactcgcatccagctcggtgtatcgccgggaattgctgagccgcctgcacctgccgttcatctgcagctcgccggatatcgatgaaagccaccgcgcaaatgagtccgccatcgaactggtcaagcgcctggccgaacagaaagcccgcgcccttgccgccagccatccggggtatttgattatcggctccgaccaggttgcagcgctcgacggacggatcatcggcaagccgcacaccttcgaaaacgcccgcgagcaactgctggccgccagcggcaagcgcgtcagttttctcactgggctggcgctgctgaacagcgagacaggcagctgccaggtcgactgcgtgccttttacagtgcacatgcgtgagttggatgccgagtgcatcgagcgttacctgcgaattgagcaaccgtatgactgcgcgggcagcttcaaggccgaggggttgggcgtgagcctgttccaaaataccgaagggccggacgccaccagcctcatcggccttcccctcattcgcctggtggatatgctgctggccgaaggcgtgcaaattccctgagaacaccacaagcaaatgcgggagggggcttgcccccgatagcagaggatcagccaactaacccgcagctgacccaccgcaatcgggggcgagccccctcccacattttgatctatatgtagcctggggctcagcgcaggcttgggccttggaagcccatgtaaaaggccagcttctccgccacgctggcaccgagccgcttggagaaacgatcaaacggcgattcctcaaccgtgaaatccaccagttccttctcgccaatcacatcccgcgctaccgaactggcactgcccaggccgtcgatcaagcccagcggcaaggcctgctcgcctgaccagaccaggccggagaacagttccggatggtccttgtccttcagacgatccccacgccccagcttcacgctggcgatgaactggcgatgagtggtgtcgagcacgccctgccagaactgggtttcatcggctttttgcggctggaacggatcaaggaacgacttgtgttcacctgaggtataagtgcgacgctctacccccagcttctccatggtgccgacgaaaccataaccggccgccgtcacaccaatggagcccaccaggctggccttgtcggcgtagatctgatcagcagcactggcaatgtaatacgcaccggaagcgcccaggtcggaaatcactgcatacagcttggtatccgggtgcaggccacgcaggcggcggatctcgtcatacacataacccgactgcaccgggctgccacccgggctgttgatgcgcaggatcacacctttgaccttagggtcttcgaacgcggcacgcaggctgctgacgatgttgtcggcgctggctgactccttgtcggcgatcaccccgcgcacttcgatcagtgcggtgtagttggcgccacgggttgcgcttttctccatatccatcagcggactgaacagcgccagcatgccgatgagccagacaaacgtcagcagtttgaagaaaatcccccaacgccgcgcgcgacgctgctcttggacgctggccaggagagtcttctccagcagcttccagcttttgtcatcactgctttcagccttttcgggcgctttccactcgtcactcatgccatcaaccccagcaaagacttattgggcctggttgagccaggcctgcaattcggaaaaatgatcgatcgtcagtcgcggttcatattgctgcaacgcctcggcagcctgggcgccatagctgaccgccacgccgtccatgcccgcattgcgcgccatcatcaggtcgaaggaggcatcgcccaccatcaaggcctggcgtggcgacacgccgcaatgagccaggatctgctccagcatcagagggtgaggcttgctggcagtttcatcggcggcgcgggtgatatcgaaataatcttcccaaccgtgggccttgagcacccgatccagaccgcgacgggccttgccggtggcgactgccaggtgataaccctgggcacggaatgccgccagggattgcaccacaccgtcgaacagcggcgagggcgtagcctccagggcgatgtagtgatcggcatagtgttcgcgaaacgcgaccagttcagcgtcgctgatctcgggatacagggtacggatcgcttcgggaaggcccagaccgatgatgcccttgaccgccagatcactgcacaacgcgtaacccgaacgggtcgatgcagcgtgcatcgactcgacaatccggccaatggagtcggccagggtgccatcccaatcgaatatcagcagtttgtagtcaaggtgcgacactcaagcgctccacggtcttggcccacatctcatcgaccggcgcctgcagcttcaattcgccaccatcgggcagcggtaccgtgagcatgtaggcgtgcaggaacaggcgcttgccgcccaggtcgcggatctccttggagaaatcctcgtcgccgtacttggtgtcaccggcaatgcagtggcccgcatgcagggtgtgcacgcgaatctgatgggtgcgcccggtgaccggcttggcctcgaccatggtggcgaagtcgccgaaacggcgcagcaccttgaacagggtcagggcttccttgccctcctcgtccacttcgaccatgcgctcgccggagcgcaggttgctcttctgcaacggcgcgcggacgctcttgatcgagctggcccagttgccgcgcaccagcgccatgtagcgtttgtctacgccatcgccgcgcagggcggtgtgcaggtggcgcaacatgctgcgtttcttggcgatcatcagcaggccggacgtgtcgcggtccaggcggtggaccagttccagctccttggcatccgggcgcaactgacgaaaggcttcgatcacaccgaaattcaggccgctgccaccgtgaaccgcaatgccgcagggcttgttgatcacgatcagcttgttgtcttcgaacacaatcgaggcttccaggcgctgcaacaagccctgggccaacggcacaggctcgtcacgctcaggcacgcgcaccggtggcacgcgcacgatatcgcccgcctgcaacttgtactcgggcttgatccggcccttgttcacccgcacttcacctttacgcaagatgcggtaaatcaaggtcttgggcacgcctttgagcctggccaggagaaaattgtcgatgcgttggccggcatattccggcgagacctcgagcagctggacgctgggggtctggggggcggtagtcgtcatggcggcgatgataacaattttttatggaattgaagcacttaatcattgctgctatagtcgcgaacgccgccaaaagcggcctggacagaggacatgcggcaaactgccggccctgaccatcgcaattcatcaggacgcgaggccgtcctacggggctttcgccaccctggaaggctcaagattgtaacaagcgcaggtgacatgaggcctgaagcgagtgcagaaagcagagtgaatactcgcgttttgcgccgatatttacggccagttcacaaagtgcagtcagtcttgagccagaccacggcgaatacttcggaaacaacgcctgttaagagctgagtgagagcgcaaccgcccacacctagtcttgtttagccatgagcgtggactccccattggagaacacggtaaatgccaacccgctgcggattctgcgcgcggcagcacccgaattatcagggatacgtgtagggtggagatgcacaaccgtcggaccgtgtagcactaggcttatatttagacgcttcatctcgtccacagtcgccggttgattcctcctcctgaccttagcttttgttgaagtggtgcctttgtcaccaccgctaacaagcaggacgcgtccgtcgcgataccggcccaattggctcgttattgctggacactggagtggccaaccactcttgacgcacctgacaccgaccgtgagaagtcgtgtgtgccgaacgccgtttccggcagcccggaaaccgacggtacaacatgaaaagaatgctgattaacgcaactcaacccgaagagttgcgtgttgcactggtagatggccaacgcctctacgacctggacatcgaatccggtgcacgcgagcaaaagaaggccaacatctataaaggccgtattactcgcatcgaaccaagccttgaggctgcctttgtcgatttcggctccgagcgccacggcttcctgcccctcaaagaaatctcccgcgaatacttcaagaaagcccccgaaggccgcgtgaacatcaaggacgtcctgagcgaaggccaggaagtcatcgtccaggtcgaaaaagaagaacgtggcaacaagggcgccgccctgaccaccttcatcagcctggctggccgttacctggtcctgatgccgaacaacccacgcgccggcggtatttcccgtcgcatcgaaggcgaagagcgcaacgaactgcgtgaagcgctgaacggcctgatcgcaccggccgacatgggcctgatcgtgcgcaccgccggcctgggccgcagcagcgaagaaatgcagtgggacctcgactacctgctgcaactgtggaccgccatcaaggaagcctccctggatcgttccgcgcctttcctgatctaccaggaaagcaacgtgatcatccgcgccatccgcgattacctgcgccaggacatcggcgaagtgctgatcgacagcgttgaagcccaggacgaagccctgaccttcatccgccaggtgatgccgcagtacgccagcaagatcaagctgtacgaagacagcgttccgctgttcaaccgtttccagatcgaaagccagatcgagaccgccttccagcgcgtggtcgaactgccttccggtggctccatcgtgatcgacccgaccgaagccctggtgtccatcgacatcaactcggcgcgcgcgaccaaaggcagcgacatcgaagaaaccgccctgcagaccaacctggaagcggctgaagaaatcgcccgccagctgcgcctgcgtgatatcggcggcctgatcgtgatcgacttcatcgacatgaccccggccaagaaccagcgcgccgtggaagaaaaagtccgtgaatgcctggaagctgaccgtgcccgcgtacaggtcggccgcatctcgcgcttcggcctgctggaaatgtcccgtcagcgcctgcgtccgtccctgggcgagagcagcggcatcgtctgcccgcgttgcaacggcaccggcatcatccgtgacgttgaatcgctgtccctggcgatcctgcgcctgatcgaagaagaagccctgaaagaccgcaccgccgaagtccgcgcacaagtgccgattccggttgcagctttcctgctcaacgaaaaacgcaactcgatcaccaagatcgaactgcgcacccgtgcccgtatcgtcatcctgccgaacgaccacctcgaaacgccgcacttcgaagtgcagcgcctgcgtgatgacagcccggaagcccacagcggccagtccagctacgaaatcgccgcagctgccgccgaagtcgaagaagtgcagccagccgccgcgacccgtaccctggtccgccaggaagccgccgtgaaaaccgctccggcccgtgccaacgcaccggttccggttgaagccgccgctccgattgccgccccggccgtaatgcctgagccaagcctgttcaaaggcctggtgaagtcgctggtgagcctgttcgccaccaaggaagaacctgctgcaccggttgtggttgagaaaccagcgaccgagcgccctgcacgcaacgaagagcgtcgtaacggtcgccagcagagccgtaaccgcaacggccgtcgtgacgaagagcgcaagccgcgcgaagaacgtgcgccgcgtgaagaacgcgccccacgtgaagagcgtgcgccccgcgaagcccgcgaagaaaccccgaccgtagaacgcgcaccgcgtgaagagcgcgcaccgcgtactccacgtgccccgcgtgaagaccgcaagccacgtggcgagcgcgaagagcgtgtgcgcgaactgcgcgagccgctggacgctgcgccagccgttgccggtgcagctgttgttgccgaagaacgcccggctcgccagccgcgcgaagaacgtgcgccacgtgaagaacgccagcctcgcgctccgcgtgaagagcgtcaaccacgtgccgaacaggccgccgccgccagcgaagaagaagtgttgaccggcgaagagcaattgcaggaagacggtcaggaaggcgccgaaggcgatcgtccacgccgccgctcccgtggccagcgtcgtcgcagcaaccgtcgtgagcgtcagcgtgatgccaacggcaacgtgatcgaaggctcggaagagaccggcgaaaacgcagaagccgctaccggcgaaccgactggcgccgaactggctgccggcctggccgttaccgctgccgttgccagctcggtcatcagcgctccggctgaagcccaggctcacgagcaggctgagcgcgctaccgcgactgttgaagaagccgtcgttgtagaagcacctgctgccgagaccccggtggttgaagcgccggtcgttgaagcacctgctgccgaaaccccagccgtagaagcgcctgttgttgaagcgactaccccgatcgaagcaccggttattcctgaagtggaagttgctccggttcaagaaaccctaccagaagttgaagcggtggctgagcaagcaccggtagtcgagcctcaaccagtggttgaagcagtggttgatgctgctccagaagttcgtgaagttcgtgaagaacagaccgccttccaatggactgccgagcctgccgctccggttgaagcgccagcacctgccccagcggtagaagaagcgccggcaccggttgccgaagttgtggttgccgagccagccccagtggttgagcccgctccggcctttgaacctgcgccggtggtagaagtgccggtggttgccgaagtggctgcacccgtggttgaagccgctccggtcagcgccctgaccgaaaacggccgtgcgccgaatgatccacgtgaagtgcgtcgtcgccgcaaggaagctgaagccgctgctgctgccgcagccgcagcacaggaagcagagcacgagagcaaacctctcgtctgattcccgcagcaactaaaaagccccgcctgagtgatcaggcggggcttttttatgttcgttcgattagaggtaatgcaacaacgcaggcacgtccacatcccataacacgccagggtcatctacaggcacctcacgcacagtcgcctgggcaaacaacggcttggctccacgatcaccggtcaaagccatcaactcaggcccaaatgcccggccaaacgccacaggatgcccgtaatgcccgtcctgcaccggcacactgatgccaccctcctccaaccccgcaatcactcgctcaatgctcgatgactgaataaacggcatatcccccagcaccaccagccaaccattcgccgaagcactggcggcaaccgcagcggcaatactgtcgcccatgccggccgagcacagcagcaataccttgcagccgtaggcctctgccaggcaaatcacttcagaccgatccggtgaagtcaccacccagcgatcaaccacgacactcggtagattcttcagtacctgctcgatcaccggccgaactacaccacccaggcccacacaatccgccagcaacttatcctggtcagcccctgccaccgcgcgaaaccggctgccctgtcccgccgccagcacaatcgcggtgatgctcactcaaccaccaccggcagcggtttcttctgcatcggtgccacgccgttcttgatcgcgacaatttccgccatcaacgacaatgcgatttccgccggcgtgtgactgccgatatgcaaaccgatcggcccatgcaggcgcgcaatcgcttgcgtcgataaccccagcgccgccaggttctcccggcgcttctggctgttgacacgtgaaccaagggcaccaatgtagaacgccgaggaattcagcgccgtcagcaaagccatatcatccaggcgcgggtcatgggtcaggcagacgatggccgtgcgctcgtcggtctggatattcaacactgcgtcatcaggcatgcccggcacaaagcggccgtgctgctcttcccagccgtagacgaactcatcacgcgggtcgcagatcagcacttcgaaatccagcaggcgcgccatttccgccacataccgcgacagctgcccggcgccgatcaacagcaggcgccagcgtgggccatagatggctcgcaggcgttcaccgtcgaaggtgacgacatcggtcttgctcgcgccactcaacgtcaccttgccagtggccagctccaactcccgggcgacgatctgatgatcctcgcaccgcgccaacagctcagccacccactcccactcgtccacccgctcctcggtcaggcgcaaggtgccgccgcacggcaggccaaaacgcgccgcctcatcgcgggtgacgccgtaggtcaccaactgcaccggcggcccgtcttcaggcagccggccatcctgcaggcgggcaatcaagtcgtcttcgatgcacccgcccgataccgagccgatcactaccccatcgccccgcaatgccagcatggcgcccggcgggcgcggcgcgctgccccaggtctggaccacgctgtacaacaccactcgctgtccggcacggcgccattcgagcacgctgcgcaggacattcagatccacactgtccacataacctcctgcaagcgttaaaaccgagtcattcactgtaaaacaaaagtcgccgaagtgacgcgccagaaacgcaaacgccccgaaccagtcggggcgtttgtgcgttgctgtcggcgttagttcacgccatcggcgatttacttgaccacaggtgcagggccttcggccacgcccaggtcatccagttcacgggtttccgagataccggtgccgccggacgccagctcgctttgcagcttgtcggtatccagctccttgacccatttggccacgacgatggtggcaacggcgttacctacgaggttggtcagcgcacgggcttcggacatgaagcggtcgatacccagaatcagcgccaggccggcaaccggcaggtggcctacggccgacagggtggccgccagtacgatgaagcccgaaccggtcacgccggcagcgcctttagaggacagcagcagcaccagcagcagggtgatctggtgggtgatgtccatgtgggtgtcggtcgcctgggcgatgaacacggccgccatggtcaggtagatcgaagtaccgtcgaggttgaacgagtagccagttggaatcaccaggcctactacggatttcttcgcgcccagacgctccatcttgatcagcatgcgtggcagtgcggattcggaggaggaagtacccagtacgatcaacagctcttcacggatgtagcggatcagtttgatcacgctgaaaccgtgagcgcggcagataccgcccagcactaccagcacgaacaggatgcaggtgatgtagaagcagatcatcaactggcccaactgcaccagcgaacccacaccgtaggcaccgatggtgaatgccatggcgcccagggcaccgattggcgcgagcttcatgatcatgttgatgatgttgaacatcacgtgggcgaagcgatcgatgaagtccagtaccggcttgccgtaggcacccaggcggtgcagggcgaaaccgaagatcaccgagaacatcagcacttgcaggatgtcgccgttggcgaaggcaccgacgatcgtgttcggaataacgttgaggataaagccgacgatgctctggtctttaccggcggtcacgtaggccgcgactttggaagcatccagggtcgctacgtcgatgtgcatgccggcgcccggttgcacgacgttcaccacgatcaggccgatcagcagcgcgatggtggaaacgatctcgaagtacagcagcgcgtagccgccggtcttgccgaccgatttcatgctttgcatgccagcgatgccgctgacaacggtgcagaagatgatcggggcgatgaccattttgatcagtttgataaacccgtcacccagcggcttgagggccacaccggtctgtgggtagaagtgaccgagcaaaataccgataacgattgcaacgatcacctggaagtacagggatttgtagataggctgacgagtcgtcattgcaaagttcctcaatcgtcccgtgtggcaaatatccgccattgcccacgacacttgaattgcgaaccctcctgcactggagggatttgttgtttgcgaggtctgtaggtccagcctgcgctgtaatccttgtcgcaaacaccgtgccactttgctgaaaaaccctgaaggcctttagacatcagggcttgggcttctccggccccctcccaagcctccaatcgagtggcggatttccgcccagcgccccaatcacgtcctacaatttggcggatatccgccttgtgaccctacccgggcatgactaccatccgcctctccatggacgaggccttcgcatgcgtgaacgtaccatcgccagccattacgctcgggcagccctcggcggcgcgcgcagggcgggctacgactactcgggcctgctgttgcaggcaggcatcaccccggaactgttgaccgaaccccgcgcccgcatcgcaccggaacaatttacccggctgctgcaaatgctctggctggcgttggacgatgaatacctggggtttgccgacggcccgagcaaacgcggcaccttcgccatgatgtgccacgcactcatccactgccgcaccctggaaaaggctctggaacgcggcttattgttttatagcctatttgcgcaaggcccacgctggcagctgacacgtgaaggcgacatggcccgcttgagcctggacgactcgcaactgtgggacccggatcacttcctcagcgaatgcctgctggtgatctggcatcgactcggcagttggctgatcggccaacgcatccgcctgcaccaggccaccttcagctacccgatgccggcccacgccagcgaatatgacctattgtttccctgtgcccaggtattcggcgcaccgaacagcagcctggtgtttcacagccgctacctgagcctgccgctgctgcaggacgaacgcacgctcaagcacttcctcgagcgctcccccgccgacctgttgtcccgcccggatgaaggcgacagcttgagcagccagctacgccgcttgctcagccgcgaccaaacaccctggcccgacctggaagccgtcgcccagcacctgcacatcagcccgcagaccctgcgcaggcatttgcgcgaagaaggcaccagctttcaggcactcaaggatgagttgcggcgggacatcgccatctatcatttggggcgcgcggatttgtcgttgcaggagattgccgagcagttggggttttccgaaccgtcggcgtttcatcgggcgttcaagaagtggacggggttgacgccgggggcttaccgagcaaaagagagttagagatgtagcgcctggactaacgctatcgggggcaagccccctcccacctttgaatgtgttcaaacatcaaaatgtgggagggggcttgcccccgatgaggcctgcacaccccataaagatcacaaagccgggaagtgaatcctgaaagcggcgccacccaatggcgaatcgcccagggtcaaccgcgcaccgtagctttcgatgatgtccttgaccaccgccaagccaatcccctgccccgggtgctggcgatccaggcgctcaccccgttgcagaattcgtgcacgctgatccggcggcacgccaggcccgtcatcctcaatacacagctcggtgccttccaggctttccaccaggctgatgcgcacttcgctcaagcacaggcggtaggcgttttccagcaggttgccgagcaactccaacaaggcgcccttctcgatcggcacatcgcattcttccggcaggtcgaaggacacgctgacgcgcttgtcgcggtagaccttgcccagcgtatcgcacaggctttgcagcaccggctccaggcgcacctggtggcgcaccaggccgcttttgcgcaggctggcgcgctgcaactgatagctgatctgctgactcatgcgctcgatctgcgattgcagcacccgggcctgctcgcgatcttccggacgctgggccatttcttcgctcactccctgtaaaacggcgagcggggttttcaggctgtgggccaaatcgtcgagggaatcgcggtagcgcacgcgttgctcacgctcgctgtgcagcaagcggttgagggagccggtcaggcgcagcaattcgcgggggtgctgttcggagaggctctcacgggtgccgccttcgatctggtcgagttcctggctcagccgccgcagggcttgcaggccccaggtcaggcccagccacagtaaggtcaacagcaccagcaaggctgcgccgaagcccaggtagagattttcgcgcaggccttccagggtcaactggtattcacgcaccggttgcagggccacgatactgaaggcggcgctcttgccgcccagtagcctgacctcgacgtcatacacgaagaattcctggccgttggcctcgcgaatccgcgcaaactcgttaccgcgcccgtcgtaacgcggtttgtagttgatgttttcttccttggtcgcccgcgaacgccacaccaggtggccttcgcggtcgtagatgtagccgagcaggcggctgtcagtgaggttgaagcgttcgtcgggcaactgcgccggcatcagcaggcggttgttttcgacccgcgcggcagagatcaaggtggtgacgtccgacgccaggcgttgctcgatggaatcctgcaacgccaggctgaacgccccttgcatggccggcaacaggccgagcatgaacagcacggccaaggtcgcggccgccagcatcaagcgcacgcgtagcgagcgaatcaacggcagcgctcattgaacagatagcccaggccacgcacggtgtcgatcggcttgaacccggccgggccttccagcttgcgacgcaggcggccgaccagcacctcgatgacattcggatcacgctcgtcgtcatcggggtagagctgttccatcaagcggtctttggcgaccacttgttggtgatgacgcatcaggtattcaaggatccgatattcgtaggcggtcaacgccagcggctgctcttcgagcgacgcctgcttgcggttgagatccagcagcaacggcccggcaacgatggtcgactgggtaaagccactggagcggcgcagcaaggcgttcatccgcgcctccagctcttcgaactggaacggtttgaccacgtagtcgtcggcacccgcagccaggccttcgaccttgtcctgccagttaccgcgggcggtgaggatcaggatgggaaaggtcttggcctgagtacgcagttggcggatcaggtccaggccgcccatgccgggcaggcccaggtcgatgatcgccaggtcatggttgaactggccagtctggtacagcgcctcttcggcattggccacggcctcgaccacatgcccgctgtcggtcaggcgggtaaacaggtgatggcgcagcagcgcctcatcttccaccaccagcaatttcataaggctctccaaggcaattcaactgtccgacagagggatatcatagcggccctgcagctcttgcgggcgcagttttatgccattgaactggccggtcaggtgttcataaccggcgcgatagcccgcctgcggggtgacaagccccagggactggccccagggcgtgggttggctgcccacttcttcgaagctgacacgctggatcaaggtgctggatttcttggttttttcaccgccgaatgcggcgaaggcgccgtcggatgcctggaccccagcggtggcactgagcatggttaacgccaacatcagctgtttgatcgcagtcatggtgttacctctatgcgtttggctgtatgccccagactacgcaggcgcccctgaactccccctgaacgggctctgaaccccacctgaaccacagcgggctatcctcgcgcccctcaactcggcaaaataccgcccatgaatccgctacccgcttgctgcaccccactcgacgcccattggccgctgcccgaatcgttgcccggcacggtgtttctcagcacgcgttttgacccggccctgctcacgcctggcgacttccagcgctgtgccgtgccgccaccggcgagcatccagcgctcggtggccaagcgccaggccgagttcctcgccggtcgcttgtgcgcccgtgccgccctgcaacaactcgaccacctcgactgcatccccacgatcggcgaagaccgcgcaccggtgtggcccgcgcacatcagcggctccatcacccacagcaccgggcacgccgccgcgattgtcgcgcacaaggcgcaatggcgcgggctggggatggacctggagaatgtgttgagcctggagcgggcggagcggttggccggggaaatcctgacggctgatgagctgcaacgcatggccaccttgccaagagagcagatagcgcagttggtaacgctgacgttctccgccaaggagagcctgttcaaggcgctctaccccattgtgcagaagcgtttctactttgagcatgccgagttgctggaatggtcagaggccgggcatctgcggctgcgactgctgacggacctgtccgaagagtggtgccatggcaaggaattggtggggcagtttgcggtgggtgatgggcagctgttgagtctggtcgcagtcagcgcctgatccatcaggatttatcctgatccctgggccaactcaaactgaaacacgcgccgcccaagttattgctcttgctgatcaacgcccgcccaccgtgccaatagataatccgccgcacaatcgacaaccccaggccatgcccgcccgaggcacgggtgcgactgtcgtccaggcgcagaaagggcgtgaagatgcgctcccaggcgctttccggcacgccggggccgtcgtcttccacgtcgatgcggcagcgtacctggcccacctgataactgatcaacacctggccctgggcgtggcgcatggcattgctcaccagattctgcaacgcacggtgcaggtagcgcggctcggcatcgacccaggcgtcgtcccaatgcgccgaagacaagcaaataccacgggctacatttatttgcggacgcagtggcgataattcgccgatcacctgatcgagcagcgcatcaaggtcgacccgttggaaattcagctctggcgagccttgttccaggcgcgcataagtgagcatttcatccactaggccgtcgaggtcctggatgtcactgtccatgccctccaggtatttacgccgcgcctcgacggtagtcgcgtcgccgaccatctccagaccaaaacgcaagcgtgccaccggcgtgcgcagctcgtgggacaccgcgcgcaccagttcgcgctggatcgccagcagctgttgcaaatgctcggccatgccattgaacgccgccgccagccgccccaccgaatcggcaccacgggccggcacccggacttccaggttgcccttggcgatccgcgtggcggcggcttccagaccgcgcagccgacgttcaagctggcgcaccaatagatagacgatcagcccgatcagggtcaggccgatcaaggcgatcaggatcagccattgcgccgggtaagggttcatctgatacaacgggccgatctccagcacccacggcgtaccgaccatgccggcaaacacgcggatcgaatcgccgcccttgcccagggccatcaccgtatcgccttccgatacacgacggcgctggtcttcatccatatcagcctggtcgaggggcatcaggtgcatgtcaaagccaaagcccttggcttcctttatctgcgccaggcgttgcggctgttcggccaccgggaagcgcaccagctcatcggccagcaggtagatggtcgcgcgcgccagttgttcgctgatctgctgcacttcacccgtcagcacaagcggctcttgttcgctgaccaagcgcagtacccgcgcggcatgtggcccggtctgttgcaccagcacctggccgcgttgcaggcgattgcgctggctcaagtccagttgtgcatcggccagcgggcgcaactccagcgggatccccagcaaccgctcccacaccgccagggcgcgctggcgctcgatggcactcatgggttgcaggttgtcgcccatcaaggcgaaggtgccatgggccaggcgctcgcggtactgaccgctgcgcacctcgttgagcaggtgcagggcgagtacgccgagcagcgccaccaggatcagcgccgcgcacatgccgccgtagatgcgcaggaagatcgagttcacagcggcatgtcggcggcggcttcggggacgaacaggtagcctttgctgcggatagtcttgatcaggcgcgggtggatcgggtcgtcacctatcttggggcggatgcgagaaatacgcacgtcgatggagcgatcctggccgtcgtagccgatgccgcgcagggcaatgaagatttcttcgcgggacagaatgcgcccggcattcgccaccaatagccacagcaggtcgaactcggcgctggtcagttcgatgccgtcattattcagccaggcttcgcgcagggcattgtccaccaccagggggccgaattgcaggcggcgctggttctccgcgctggcggtctcggccgactcactgcgccgcagcaaggcctggatgcgcgccagcagcaggcgcggacgcacgggcttgcacacataatcgtcggcgcccatgtccaggcccagcacctggtccatgtcgtcggtgcgcgcggtgagcatcaggatcacgccgtcatagcgctcgcgcaccttgcggcagatgctcaggccgtcttcgccgggcagcatcaggtcgaggatcaccaggtcgggctgttcggcgatgatccgcgccgctgccagggcgccatcgccctccaccgagacgcgcaggccgttgctctccaggtactcacgggtcaactcggccaatcgctggtcgtcttcgactatcaatacctgccaggcttcttgctccacgggtgacctcaatgtctgtcataaaaggcgggcatgatgtgggtcacttcttagcccgatgtgggcgattgtagccatgggccagccctcaaacacaagccgggaaatccattcggtgatcgcgtttttttgtgatagggttcgcgcccttcgaaaatgggccgcttgttttgagcccgtaacatttaatgacaaacggtgtaatccagcagcaatgcggcctacacggctgttctacctttcttacacattttacccacagcgttatccacaggttactgcgttgctaacccctcaaaaacgcattatcttgtacctcggcactacagaagaccctacatgtggggttttcacagaaatcgcccaaccacacaagtggctcgaaattcaagcgttttattgctagcgcagcatggaaccaaccgattttcagtagaccaaaccgctcacgcggatggcagctgtttcccatccccgatatggaaaacggtacgggtgttgcaggaagagcctggcactcgcaatcaaatatagaacgtggagacaaccccccatgcaaaccgacacaactcgcgagaacccgcaaggctccgtgccgcaggccgccgattcgaacctggatctgtccgccactgcacccggccaattgcgcgtgatcaagcgtaacggcactgtcgttccttacaccgatgacaaaatcaccgtcgccatcaccaaagcgtttcttgcagttgaaggcggcaccgctgctgcctcgtcgcgcatccacgacaccgttgcccgcctgaccgaacaagtcaccgcgaccttcaagcgtcgcatgccatcgggcggcaccatccacatcgaagaaatccaggaccaggtcgaactggccctgatgcgtgccggcgagcagaaagtcgcccgcgactacgtgatctaccgtgattcgcgcgccaaggaacgtgccgtacgctccccggccgaagaagccgccgtgcaagcgcatccgtcgattcgtatcaccctggccgacggcagctttgcaccgctggacctgggccgcctgaacaccatcatcaccgaggcctgcgaaggcctggaagaagtcgacggtgacctgatccagcgcgaaaccctgaagaacctgtacgacggcgtggccctgaccgacgtcaacaccgccctggtgatgaccgcccgtaccctggttgaacgcgagccgaactactcgttcgtgactgcgcgcctgctgatggacaccctgcgtgccgaaggcctgggcttcctgaaagtcgccgacagcgccactcatcatgagatggccgacctgtacgccaaagccctgccggcctacatcgccaagggtatcgaattcgaattgctgaacccggtcctggccaccttcgacctggaaaaactcggcaaggcgatcaaccacgagcgtgaccagcagtttacctacctgggcctgcagaccctgtacgaccgttacttcatccacaaggacggcatccgcttcgaactgccgcaagtgttcttcatgcgcgtggccatgggcctggcgatcgaagagaagcacaaagaagaccgtgccatcgagttctacaacctgctgtcgtccttcgactacatgtcgtcgaccccgaccctgttcaacgccggcaccctgcgtccacagctgtccagctgctacctgaccaccgtgccggacgacctgtcgggcatctaccacgcgatccacgacaacgccatgttgtccaaattcgctggcggcctgggcaacgactggaccccggtgcgcgcactgggttcgtacatcaagggcaccaacggcaagtcccagggcgttgtaccgttcctgaaagtcgtcaacgacaccgccgttgcggttaaccagggtggcaagcgcaaaggcgctgtctgtgcctacctggaaacctggcacatggacattgaagagttcatcgagctgcgcaagaacaccggtgatgaccgtcgtcgtacccacgacatgaacaccgccaactggatccctgacctgttcatgaagcgtgtcttcgatgacggcaagtggaccctgttctcgccatccgaagtgccggacctgcacgacctgaccggtaaagccttcgaagagcgctacgagtactacgaagccctcaccgagtacccaggcaaggtcaagctgttcaagaccatccaggccaaagacctgtggcgcaaaatgctgtccatgctgtttgaaaccggccacccatggctgaccttcaaagacccgtgcaacctgcgcagcccgcagcagcacgtgggcgtggtccacagctcgaacctgtgcaccgagatcaccttgaacaccaacaaggacgagatcgccgtttgcaacctgggctcgatcaacctcccgaaccacatcgtcaacggcaagctggacaccgccaagctggaacgcaccgtcaacaccgctgttcgcatgctcgataacgtcatcgacatcaactactactcggtgccacaggcgcagaattccaacttcaagcaccgtccggtgggcctgggcatcatgggcttccaggatgcgctgtacctgcagcacattccttacggttcggatgcagcggtcgagttcgccgacaagtccatggaagcggtcagctactacgcgatccaggcttcctgcgacctggccgacgagcgcggcgcctacgagacgttccagggttcgctgtggtccaagggcatcctgccgctggactcgcaacagatcctgatcgaagcccgtggccagaagtacatcgacgtcgacctgaacgaatccctggactgggcgccggtacgtgcccgtgtgcagaaaggcattcgtaactccaacatcatggccatcgcaccgaccgccaccatcgccaacatcaccggcgtatcgcagtcgatcgaaccgacctaccagaacctgtatgtgaaatcgaacctgtcgggcgagttcaccgtgatcaacccgtacctggttcgcgacctcaaggctcgcggcctgtgggactcggtcatgatcaacgacctgaagtactacgacggttccgtgcaacagatcgagcgcatcccgcaggaactcaaagagctctacgcgactgccttcgaagtggacaccaagtggatcgttgacgccgccagccgtcgtcagaagtggatcgaccaggcgcagtccctgaacctgtacatcgccggcgcttcgggcaagaagctggacgtgacctaccgcatggcgtggtaccgtggcctgaaaaccacttactacctccgtgccctggccgcgaccagcaccgagaagtcaaccatcaacaccggtaagctgaacgcggtttccagcggcaaccatggtgatgactcggtgcttgcagccccagccggcccggcgccagtgccaaaggcctgcgcgattgacgagccggattgcgaagcttgtcagtaagctgaggcactttcaggtttaactacctgaaacagcgagccccctgtaagcccaggatttcaaccgggcttacagggggcttttgattacaggagatccctctttttacttaggcatacccccgcttgaagctccaggcaatcaaattgggatcagtgcgtgcattgccgaacttcgtaccccatcgatcctcattaccgcccattaccgccaccgaatgtgttgaattatccaaggtgccgggccggcccctggccaactcagaaggactgactctctctacaagatttttataccccaaccgatcgaaagtctccttagcccactccccattattgatgctatcaatggcttcgctgaagcttctcccggaaataccgtcgttacgctggttcattgcctgaacgttattcacggccaacatgagattcataaacccaagcaacttgggatcctgtccctgtagttgagcccttgctgctgtctcacggtactgcgactgcgtaacccggacatgattgccgtctttgagcgttacatcgtaattacctgctgagtcccgcttgacgtccttaaacacacccgctggcccatactgcgcaatcatggccttacaagccgaaatagcgccgcaattacctgcttgtccctgataggcaccggaaaagagatttttcggcatttcaccaggtttgtagctacccggctcgaaattggtttgatgggttcccgccgtgaccggcaagttacccaccgcctctcctaaccctaaccccccacggtcaacgccaccgccttcgtaacgaccgcgtccaccaccgccaccacccgaaccaccaacaccacctcctatcccgcggcttgactgcgattcaacatcagtcgacacgccatctggaaacagctcaggaaacagtgccttcataaactcaagccaactgttaggcgcgtccttttttaactgctcgataatctccttgaacttgtcctcccccaacttcttgcgcaaatcattcagcttgtcacgcaagtcttgaacagtctggttcttggaggttttctgagcgtcttccagttccttgagtagttttaagacggcatccttatcagcagctgtgctgtctttggtttcctcagtgcgcggtacacccgtccctccttgccaatacaccaagcccctatcgcccgacgtcaataagtcccacataaccttcgcctctaacaaaactattggctcaatgggtggagcaagaggtgtaggtagttccagcaaatcgtgtgatctcttgagcgggtagccctgccaaaaaatcaatgcaaaaaaaacccctcagtcgaggggcttctttcttcaagggatcaggccaacagcgtcacgtcatctgaatgatggtctgcatgatggtgctctgggtggagatggtcttggcgttcgcctggtagttgctctgggccttgatcaggtccaccagctcgttggtcaggttgacgttggagttctccagggagttggccacgatcgaccccagggtaccggcttgcggggtgtcgtaacccggctggcccgacgcgaaggtttctttccaggtggtgccaccggctggctgcaggccctgctcgttgttgaagctggccagggagatctggccgatggccttgctctgctggttgctgaacgtggcgaacagtacgccgctaccgtcgattttcagcccggtgatctggccggtggcgtagccatcggtgaccggtgggttgcggtaggtggccgagttgtactgggtgatgttggccatgttgacggcgatacctgttgggttcgcatccgcaccgttggccttccacacaccattggtcacggtgccaggaacccaaccggtaatggtcagggtcttgtcggagacaccaccggtgaccacactggtcagcttgccggcgccgtcaaaggtcaaggtcgatggcacaggtggggtcgatggggtgccggttggcgccgaaccattagggttgcgaccatcgatcagggtataggcattccacttattgccgtcggttttcaccaggtactgcaccatcgggtgcgcgttgccctgggagtcgtacaaggtggtgctgtactgggtggtaaaggtgctggtgtcgttcgggttgaacggcttggccacctggtcgatcaccggctccgaggagttcaggttactggtggaatccactttggtggaggccttgggcggcaggttcgacaggttcagttgcaggtcggtcaggccgcccttgatgatcttgccatcggcatctgccgcgtagccttgcaggcgcgaagtgccggtgttgttggtgatgtagccgtctttgtcggcacggaaggcaccgctgcgggtgtactccagcgaaccgtcgctgcccttctgcacgaagaagccgccaccctggatcgccatgtccaggatcccgccgctgccgttgacgtcaccttgggtgaactgctgcgacacggccgcaaggttcacaccgttgccgatgctgttctggccggtgcccagcttggacgcggcgtagatgtcggcgaattccgcacgggacgacttgaagccagtggtcgcgacgttggcgatgttgttgccggtcacgtccagttgtttgttggccgcatagaggccgctaaggccgatgttaaaagacatgtttctctccctctgccgtatttagccggctctatgtaccgatagtctgaatttgcgacagcttgacgctgcccatgccgccagccaggttcagcagcatttcgccgccggtcttgctcagggtcacgctcgttaccgtcgcgggcagcgaagtggccagggcaacggagtcgcccttgtcgttcttggtggtggcgttgaaggtgtaggtacccgccggggcaacctcgcccttgtcgttcttgccatcccagatgaagttctgggtgccggcgctctgggcccccatgtcgatggtgcgcaccacgttgccgtctttgtcggtgatcttgacggagacgttgcccaccgccgaggtcaccgccaccgaaccggtcatgctcttgctcgtatcaaccatggccttgtcggtctggatgatgatcgagcgcccgaccagcgacgaggcctgcaacgcctgcgacgaactgaagttggtggagatcgcattcaccgagtcgttcagggtgttgatgccttccaggctgctgaactgcgccagttgcgccacgaacgcgccgttgtcttgcggcgacagcgggttctggtttttcagctgggtcaccagcagttgcaggaacgcatccttgcccaacgcctgcttgcccgtcgccttattggcggcgtcgctgacgctgctgttgtcctgggcgttcttgaccttggagttgaacaggtcctggaccggcgtgttgtttgacgtatcaacgatggccattgtttggcgccccttatcactgacccagggtcaggaccttctgcatcatggttttggcggtgttcatcatttccgcgttggtctggaacgagcggctggcggaaatcatgtcagccatttcctcgaccacattgacgttggggtagtagacataacccttttcgttcgcagcgggatggttgggttcgtagcgcgcttcaaggttgctctggtcttcgaccacaccgagtacctgcacgccggagccggcggccccctggtcctggaacagcgaatcgctgccgccgttctggcctgcctggaacatggtggcgaacaccgggtgacgggcacggtaggtctggtcaatgctcgaagacacggtctcggcgttggcgatgttactggcgacggtgttcaagcgcgtggtctgcgcgctcatgccactgccggcaatattgaaaacactggacagggacatggcttactctccacgcagggctgacatcagccctttgaatttgctgttgagcagggtaaagctggcctggaagttcaccgagttctcggcgtaggccgattgctccagttgggcgtcgacggtgttctggtcgatcgacggttgcatcggcgtgcgatacagcaacgactcgtcaccattgctcaggccttgcgcttcgatatgacggctgttggtcatgttcaaggcgaaggtgccgttcttggtcttgtcctgctgtgcggcgagcacggcggagaagtccaggtcccgagccttgtagttcggggtgtcggcgttggcaatgttgttggccaggacttcggcacgctgggcgcggaagcccagggcttgttcgtggataccgagcgctttatcgaagctgatgctcatggcggaaaccttcaagggctgacctgcttttcgttaacagggttatagcaaggtgcatgccaatctggcgcaagcccgtatatcaagggttttggtaaggggttgccggcggcaatgccggaaaagcggcaagcggtttccgcgtcgcgccagtaaagcggcaatgagggttgccgctttattgcggtttgccgcaaaccaaatgtgggagggggcttgctcccgatggcnnnnnnnnnnnnnnnnnnnnnnnnnnnnnnnnnnngccatcgggagcaagccccctcccacattttttaccgcacagccttatttagcctggtagatgatccccgggctgcactgcaccatctggaaatggtccggcagaccgttcagcgcctcagaagcgccaaggaacagataaccaccgcgcttgagcgtgccgtggatgcgcaacaggatgtctttcttcacttcggccgagaagtagatcagcacgttgcggcagaacaccatgtcgaacttgcccaggctggcgtagctgtcgagcaggttgaaggagcggaattccacgcggttcttgatcggcgccttgaccgcccagcgtcctgcccctttcgggtcgaagtaacgctgcaggcgctcctgggacagaccacgccccagggccaggctgtcgtactcaccggtcttgcagttggtgagcatggtgccggacagatcggtggccacaatttgcgcccccgccttcaactggcccatgttggtccgctcgaactcatcgatggacatcgaaatcgagtacggttcctgccccgaggagcaggccgccgaccagatgcgcaggcgctggcccgggctggccttgatggcctccggcagcactttgctcttgagcacttcaaacgggtaggtgtcgcgaaaccacagggtttcgttggtggtcatggcatcgaccaccatttccttgagcccgctgcgcggctggccctggatgcgctgcaccaactcacccaacgacttgatgccctgctgctccatcagtttgttgagacggctggataccaggtactgcttgttttcaccgagcaatatgccacaggctttttccaggaagacccggaactgttcaaaatccaaattacctgtagacactgataccgcctctaaaatcgtatgaccgccaagggaaacaccttagctgtgatctgctgccttgatccggtcgacaacccgggatgccaggtcatcaggacggaatttggccaaaaagtcatcggcaccgaccttcttgaccatcgcctggttgaatacacccgacaacgaagtatgcaggatgatatgcaatttttgcatgcgtggatcgttgcggatctcggccgtgagggtatagccgtccatttccggcatctcgatgtcggaaatcatcatcaagaattcttcttccggcttcttgccgtcatccaccagcttgcgcaggtagtccagcgcctggcgcccatcattgagggcgaccacttcaacgccgacggtttgcaggcaccgggtcacctgcttgcgcgccacggacgagtcgtccaccgtgagcacgcgcagtgagactgccttgtgcgcggtttcggcgtccaccacacccaccgagatcgactcggaggtaggtgccacttcggcgagaattttctcgacgtcgatgatttccaccaactggttgtcgacccgcgtcaccgccgtaaggtaatgatcgcgccccgtgcccttgggcggcggatggatctcttcccagttcatgttgacgatgcgctccaccgaacgcaccaggaaaccctgggtcttggtgttgtactcggtaatgatcacgaacgggctttcgcggtcctgcaaaccggcggaaccggtggccagggccagatcaagaatcgggatcgtcgcgccacgaatgttggcaacgccacacactaccgggctggacttgggcatgatcgtcagcttggggcattgcagcacttcccgcaccttgaacacgttgatgccatacagctgcttgccatccaggcgaaaaagcaacaactccaggcgattctgccccaccagctgtgtgcgctggtttactgaatccattactcctgccatgccttgactcccacgctaaaaccttcggccatacctataagggcagtgacgcgcacccaacactaaacggcacgagctttgctatttattggtcatggatattaaaacgacagtttcccgacgcctccacctgacacggtattgcagactgctctgcgcaccgctggcactgcttgccttgggcctgggcgccacggcccgcgcagataacgtcaccttgcctgatctacttatcggcgtcacccagggctttcttgagttcactgtagaagattatctggcgaccacccagacgccggggcgttatgaaatccaggtcaaccagttggacccgcgcctgcgcatgcccatgtgcgacaaggaattgacagccaccctggaaagccccgcccaacccatcggtcgcgtaacggtgaaggtgcgctgcgacggcgcctcgccctggacggtgttcgtgcccgcccaggtcaaattgttccgcgatgtggtggtggttgcccgcccacttaaacgcacgggcattatcggttttgaggacgtggtgctgcgcgaacgcgacatcagcatgatcagccagggctacttgacctccctcgaccaggccgtcgggcagaaactgacccgaccagtggtcaccgatcaggtcatcaccctggtgcacctggagcaggccgaggtgattcgcaaaggtgaccaggtagtgatttccgccagcagtggcgcgctgcaggtcaaaatgccgggggaagccttgtccaacggcggcatgagcgaacagatccgcgtgaagaatctcaactccaaccgtgtgatcaaggcgcgagtcacggcccccggccaagtggaggtggctttatagaccactggtatcagacgccagcttttcctacactgtcggttggatgccggccggtgcagtttattgtcattcgagcctaaagtttgtccggatatggccgaaaacatggcaagcgtccaaatacccagaggttttttgatcatggtcatcgatttcagccgtttaaatagcaccccgacaacgtcggctcctacgcgcactgtcggcaccaaggacagcgtagaagccaaggctcagccactgcccgccaaggcagaacaggccagcgccagccagagcggggaatccgtacacctgagcaatgaggctcaacagttgcagaaggtcactgactcgctgcgcgatcaaccggtggtcaataaagcccgtgtggccgaattgaaacaggcaatcgccgatggcagctataaagtcgacagcaaccgtgtagccagcaagctgcttaatttcgaagccgagcgctaggcaaaggcctgcgccgggcttttggacgcttaaaccccaaggccagccatgcatcacgacgaaaccctgcttcaactgatcattgatgatctagcaccgacgcaattgctgctcgagctgctcagggaagaatccctggccctttacggccgggacatgcccctgctggaagaaattctggcgcgcaagcaatcgctgattgtcctgctggaacagcacggcaaaaaacgcagcgagatcctcgtcagcctgggcctgcccgccgaccatgatggcctcgcgcagctggccagccactcctcggtcggcgatcaactactggcccagagcaaagaactcaacctattgctcacccagtgccaggaagccaaccaactcaacggtcagtcgatccagcttcagcaagccacgaccgccaaccagttgcgtatacttcacggcggagagcctccagcgctttacaacgctcagggttccacctcgcgcctggtcaagccaagcacccgcagccaagcctgacgccggtttacagcgcggcctatccaaggcgcgccacatactggcagaatgcccgctcttgcgtgtagtcgtattttgtctggagatggaagaaccgtgttcaacgcccttaatgcggaagatgccccgcagccacccaaggtcctcaccacgcctctggaaatcgccagtaccttgcgcatgctgcaagatagccatgacccgctgatcattaccttccacgaacgcagccagcgcttccagagctacctggtggacgtcagccgggacaacggcaccctggccctggatgaaatgatcccccgcgacggtgaacgctacctcgaaaatggcgaacccttccgtatcgaaggtttccacgacggcgtacgcgttgcctgggaaagcaacggcaacctgagcatcagcgagaaggacggccaccgcatctacaccggcagcctgcccgacgaagtggtctaccaccagcgtcgcaatgcctttcgcgctgccctgaagctggcgcaactggtgaacatcgaattgggtggcgagaagctcaaggccccgatcagcggcaagctgctggatatttccgccacaggttgcaaattgcgctttgagggagacatctccgagcgtctgcagttaggccaggtctacgaccgctttatcgccgccctgcccttcggcagcatgaccacctcggttgaactgcgttacctgcactttgaagagaagatcaacaccacgtttgccggcgtgcgcttccacaacatgagtggtctggtgcagcgtcaggtcgagcgctttgtctaccagttacaacgcgaagcacgacgtttcgataaagacgacgatttttaaactcaaagatcgcggcaaaaaaacgggcagaccctgatgggatctgcccgtttttgtattcaggggcgcgccctgctcaagtcatgaggatgctcgtccgggcccggcggctcaggcggcccctcaaagagcggctcgtcgaccgatgtgaccgtttccggatcgggttccggcgcggcggtttgcatttgctcctgcaccaccgcctcgtccacccgtggatcgaggcaggctaccaacggcgagctggacatgctgtcgggcattgccacgtggtgcagcggcgcgtcatccacctgatgcaggttggtcacggctttcggccgaatccgccacaccaggatcagcgcacacaggctgaaaaacgcatacagcatgtgactgccaaacaccttcatcaccacaccggccagcaacggcccgatactcgcaccgacaccgtaggtcaccagcagcatggcggtgagcgagacacggcggtcgccttccacatgatcattggagaacgccaccgccagcgggtacaaacagaactgcaccagagaacacacgaagcccgccacgaacagtacttccagcggcaccttggtcagtaatgccagcggcagcgccgccactgccaggcacagggcaaagcaacgaatcagcagcgcgcgatcatagcggtccgacaaccagcccaacggccactgcaccagcaggccggcaaaaatacaactgcccatgaacagacccacctgttcggtagacagcccttgctgggaggcatagagcggcgccaggccatagaacgagcccacgatcacccctgcccccagcaccgtactcaacgactgcgggacgcgcttgataaagaagcgtggctccatcggcgccggatgcaggggcgccgggtgaatacggcgagtcattgccaccggcaccaggcacagcgcaaagcacagtgcgaccagcatcagcaattcgaggccgagctgagggtgcatgaccaggatcaactggccgagcaccagccccaggtaggacgcgatcatataaccgctgaacaccacgccgcgctgcttggcgtcggcctgttcattgagccagctctcgatgaccatgtactggcacatcatccccaggcccacgatcatccgcagcacaatccaggccggcagccagtcgatcagaccatgccccagcaccgccgcgccgacaatgccagcgcaggttgcataagcacgaatatgcccgacccgggcgatcaggcggtgcccgatcttgccgcccagcaccaggccaaaatagttggccgccatcagcgcaccgacccacaggctatccacatggtcggccgccaggcgcaaggccaggtaggtactgagcaggccggagccaatcagcatcatcaaggaggcgaaataaagggctcgaaaagatttccagatctggcgcatcggcgttccgagcggctccttgcagtgagagacaggcctatcggcatgatagtccggggtgaccgggtccggacaggcaacttgcgctgtttccggggattattttgcttaaaggctcagacgctgcccgaccgcttgtgaggtacaccgattgtgaaaaatgcacgcacacgtgctgtgaacgctgaacaccggcaaggttcgacccgtctttgaaaggcgcccacaaaaaagccctgccagaacagtctgtgcagggctttgaatctggtgtcccagggccggttcgaacggccaaccttccccttaggagggggatgctctatccaattgagctactgggacaaatgacagccgctacactgggacgcggcgacagacggcgtgcatgttaacggccagggtaggttttgtcatgtcgtccgtaggctttttgagtgtaggccgatacttgcctgattgatcgtgtttcaaccccggcgacgcgggcgcacgggctgtatcgtgcaaaatgcactccctcaaaatgccatcattgcaaattgcaacctaaaagccattaaaaccatcggtaagtatctgattttattgaattaatagattggcacgacacctgcaatacttctcctacaaccccaataagcctcggcgttaaacggagaacataatcatgaacagtgcccttctgttagccctgaacaccgtcgccctggccgcgttggtcatgtttcattttcaatccaccggtagcaacgaccctgcgcagatcagccaggccatcccccaccatttgcaacaacgcccgcaactggcagtgatgactccgaatgcgcaatcgccggtacgcctgacccaagacacccaagcggcacctgctactgaacactgggtattctgaggaagccgctgatgaataaatatgcctggctgttcctgtgcctgaccgttgccacagcggttctgggtttgggtgcggaatctcaagacggcacaaccaccgctttcattgccagcggtgtattcgccagcctcttattgctgacgctcatcgtcggtcgtcgcatcaaattcgaccctgtcctgcgctaatcccctctgcgcccgaccttatgtcgcctgaccctcgcatatcggcaaattgccactagtcttaaagctaagggcaaagggccactttgctataggatgtgcggcctgaaaccctgtagtggcccgggcttgcgggaagttccctcgcggattcacgcggtgaaaaattttccaaccagtccgcaaaaatgcaaatgagtgctggcataaagcctttaggcagttcaatatttgtcacagaattgacgccaaggaactgtcaaatctgaggcatgatgcggcctctttgcaattcaggttgaactttggtcgtgagccttgtcttaacactcatcttgcggccaattccaaaaaccgctcccctgaactaaccggttaaatatatgcgcccattgaaacaggcaatttattccagccgtacggctgacaagttcgtcgtacgtctgccagacggaatgcgggaacgcattgccgaggtggctcgcaatcatcaccgcagcatgaactccgaaatcatcgctcgcctggaacaaagcctcattcaggaaggtgcgctgggcgacgagttgagcatgcgcctggacagcccagagctgtcgttgcacgaacgcgaactgctgcagcgttttcgtcagctctcccaccgccagcaaaatgctctcgtctcgcttatcgcgcacgacgttgaggcggccgcagaagccaattgatctgcaactgaaagccgaagccagccatgtgctggcttttttttgcctgggatttgggaagagaatgcaaggcgggagcagatacgctcccgccggatggaatcaaagtagaaagatcgtcgccagacccaggaagatgaagaagccaccactgtcggtcatggccgtgatcatcacactggcccccatggcagggtcacgcccaagacgagccagggtcatcgggatcaatacgcccatcagcgccgccagcagcaggttgagggtcatcgcagccgtcatcaccacccccagcgaccaactgccatacagcaagtaagccaccacaccgatcaccccaccccacacaagaccgttgatgaggccaaccgccagctccttacgcagcaaacgcgatgaattggcggtactcacctgatccagcgccatggcgcgcacgatcatggtaatcgtctggttacccgagtttccgccgatcccggccacaatcggcatcagtgctgcaagcgccaccaacttctcgatcgacccttcgaacaagccaataacccgcgaagcgataaaggctgtgatcaggttgatggccaaccacgcccaacggttatgcagcgagcgccaaaccgaggcaaagatatcttcctcttcacgcagacccgccatgttgaggacttcggtctcgctttcttcacgaatcaagtcgacgatttcatcgatggtcagacgaccaatcagtttgccgttcttgtcgacaaccggcgccgagatcaggtcgtaacgctcgaatgcctgggccgcgtcgtaagcgtcctcgtccggatgaaagctcacggtgtcgctggccatcaggtcggcaactttcttctccggatcattgaccagcaggcgcttgatcggcagcacgcctttgagaatgccttcgtaatccaccacgaacaatttgtcggtgtgacctggcagctctttgagtcggcgcaggtaacgcagcaccacttccaggctgacgtcttcacggatggtgaccatctcgaagtccatcagggcgccgacctggtcctcgtcataggacagcgcggagcgcacacgctcacgctgctgagtatccaacgcttccatgagctcatggacaacatcacgaggcagctcaggggccaggtcggccagttcgtcggcgtccatctccttggctgcagccaggagttcgtgatcgtccatgtcggcgatcagggtttcacgaaccgagtcggacacttcgaggaggatgtcgccgtcgcggtcagccttgaccaactgccatagggtcagtcgatcatccagcggcaaggcttcgagaatataggcgacgtcggcggagtgcaggtcgtcaagcttgcgctgcagctcgacgaggttttgccggtgaaccaggttttcaaccaggttgttattcgggccatcctggcggtgcgtaaggtcttcgaccacacgctggcgctgcagcagctcaatgacttgagccaggcgatcctgcaggctttcttgtgttttctttacttctacttcggtcataggcgaactccactcccagcagcggggcacgccggaaggatcaatcagtcaattcatgattggtaaaacggggtactgagtaactactgggtaagtccatggaggtattccacaagccccggcggggctgacgggcgcaatgatacaccgcccggccactttaaacgtcaaaaaactggaaagaacaagcgcttgcgagccaaagctgagcaacggccgcatctatgaactgcgacgacgcagcggatgaggaaaacacatgaaggcgagagaaaaagaacaaatcccacacaaaccccagacggcaaaaagcccgcactaggcgggctttttgtttgtatggtgcactcgacaggattcgaacctgtgaccgctcggttcgtagccgagtactctatccagctgagctacgagtgcagattgtgtttttagaccagatcacaactggttgtaaccgaatcacctgcattgctgcaactgactcttaaatggtgcactcgacaggattcgaacctgtgaccgctcggttcgtagccgagtactctatccagctgagctacgagtgcatttgttgccgcgcattataggccgttcaatctctatgtaaagctattttttcgagtaatttcaacaacttaccgaaaaaaccagattgcaacgtactaagcaaataatggcggagaacgggggattcgaacccccgacacccttttgaggtgtactcccttagcaggggagcgccttcggccactcggccagctctccgcaacacggggcgtatattaaccacgttcatccccgtttgcaaacataaaaaacgataaaaattaaaggcttggttcttcgtccttctctttcttgatccgcaggtagatttcctcgcggtgcaccgctacctctttcggagcgttaaccccgatacgcacttgattgcctttgacgccgagcacggtcacggtgatttcgccatcaccgataatcaggctttctgcgcaacgacgagtcagaatcagcatacctttctcctcacgcatttcagttcaggaacaacagtctgcaaaaaaaaggccttcgacctacaacccaaaggccatagccctaccgcctaagtattgtcgagcgcgcgcaaaagaacatgcgccctacaaaaaaaggaaaggcgcggtaaaccgcgccttccaggcactgcgtcactcgccctgtcgggccggagcgtccagctcaaaagcggtatgcagagcgcgtacagccagctccaggtacttctcttcgatcaccaccgagactttgatttccgaggtggaaatcatctggatgttgatgctttccttggccagggcctcgaacatgcggctggcaacgccagcatgggaacgcatgcccacgcccacgatcgacaccttggcaatcttggtatcgccaaccacctcgcgggcgccgatttccttggcagtgttctgcaggatccgctcggccgcatcgtactcgttgcggtgcacagtgaaggtgaaatcggtggtgttatcgtgcgaaacgttctgcacgatcatgtcgacttcgatgttcgcaccgctgataggacccaggatcttgaacgccacgcccggggtatccggcacgccacggatagtcagcttggcttcatcacggttgaaagcgataccggaaatgatcggctgttccatggattcctcttcatcaatagtaatgagggtgcccggaccctctttgaagctgtgcaatacgcgcagcggaacgttgtacttgccggcgaattccaccgcacggatctgcaacaccttggaaccgaggctggccatttccagcatctcttcaaaggtgatcttgtccaggcgctgggccacggacaccacacgcgggtcggtggtgtagacgccatccacatcggtgtagatctggcattcatcagccttgagggccgctgccagcgccacgccggtggtgtccgaaccgccacgcccgagggtggtgatgttgccctgctcgtccacaccctggaagcctgctacaactaccacgcgcccggctttcaggtccgtacggattttctgatcgtcaatctgcaggatacgcgccttggtatgcgcgctatcggtgaggatgcgcacctggctgccagtgtaggacaccgccggcacaccgcgtttattcaacgccatggccagcaacgcgatagtcacctgctcgccggtggacacgatcacatccagctcacgcggcagcggctgttgatcaccactgattgccttggccagatcgatcaggcgattggtctcgccgctcatggccgacagcaccaccaccaggtcgtcgccggcatcgcggaacttcttaaccttgtcggccacctgctcgattctttcgacagagccgaccgaggtgcctccaaatttctgtacgatcaaagccatttctaagccgcctcagcccgtaaaggggcgcctaatatccaatcaaccagcaccacaccggcccgtgactagaccacgggccggttaacagtgccttaaatacctgcctcgacaaacggcacggtcagggccagggccgcgtccaggctgccggcgtctacaccaccgccttgcgccatgtccggacgaccaccacccttcccgcccactgccgcggcggcttgcttcatcaaatcaccggctttgagttggccagtcaggtccttggtcacacctgcaaccagcacgaccttatcctcatggacaccgccgagcaggatcactgcgcggccgagcttgttcttcaactgatcgaccaaggccaacagcgccttgccgtcctggccgtccaggcgtgcagccaggactttgacgtccttgacgtccaccgccgaagccgacaggtcgtcgccggccgcactggccgccttggcctgcaactgctccagctgtttctccagggcgcggttgcgctccagcacagcggacagcttgtcgatcagattgtcgcggctgcccttgaccaggctggccgcttccttgagttgttcttccgccgcattcaggtaggccagggccgcagcgccggtcaccgcttcgatacgacgcacaccggaggccacgccgccttcgctgatgattttcagcagggcgatgtcgccggtacggttggcgtggataccgccacacagctccaccgagaagtcaccgcccatgctcagtacacgcacgctgtcgccgtacttctcgccgaacagcgccatggcgcccttggccttggcggtctcgatatcggtttcttcggtttctaccgcggtgttcttgcgaatctcggcgttgacgatgtcttccagggccttgatctgctcaggcttgatcgcttcaaagtggctgaagtcgaaacgcaggcgctggctgtctaccaaagaacccttctgctgcacgtgctcacccagaacctggcgcagcgcggcgtgcagcaagtgcgtggccgagtggttcagcgaagtggcatgacgcacatcagcgtccacctgggcatcgaccggcgcacccacggtcaggctgcccgaagccaacacaccgtggtgcaggaacgcaccgccggtcttggtggtgtcacgcacatcaaaacgaccggaagccgccttgaggaaaccgcagtcgccaatctggccaccggactcggcgtagaacggggtctggtccagaaccacaacaccgtcatcgccttcattcagtacatcaaccgactggccgtccttatacagggcgaccactttggccgagccgctggtggccttgtaaccggtgaattcagtggctacgtcaaccttgaccaggctgttgtagtccatgccgaacgagctggccgaacgtgcacgcacgcgctgggcttccatctcgcgctcgaaaccttcctcgtcgagggtcaggttgcgctcacgggcgatgtcgccagtcaggtccatcgggaaaccgtaggtatcgtagagcttgaacaccacgtcacccggcaccacggagccttgcaggttggcgaggtcttgctcgaggatcttcaggccctgctcaagggtcttggcgaactgctcttcttcagctttgagcacgcgctcgatgtgcgcctggttctgcttgagttccgggaaggcttcgcccatctcggccaccagggccgcgacgatctgatagaagaaactgccgttggcacccagcttgttaccgtgacggcaagcacgacggatgatgcgacgcagcacgtagccacggccttcgttggacggcagcacaccgtcggcaatcaggaagccacaggaacggatgtggtcggccacaaccttgagggaagcctggtcttcattggtgcaaccaatggccttggccgcagcggccagcaggctctggaacaggtcgatctcgtagttggagtgcacgtgctgcatcaccgcactgatccgctccaggcccatgccggtgtccaccgacggcgctggcaacggatgcaacacgccatcggcggtgcggttgaactgcatgaacacgttgttccagatctcgatgtaacggtcgccgtcttcttctggcgagcccggtgggccgccccagatgtcagcgccgtggtcgtagaagatctcggtgcaagggccgcacggaccggtatcgcccatggtccagaagttgtcggaggcgtacggtgcgcctttgttgtcgccgatgcgcaccatgcgctcagccggcacgccgacttccttggtccagatgtcatacgcttcgtcatcgctggcgtagacggtgacccagagtttttccttcggcagtttcagcacgccagtcaggaaggtccaggcgaagttgatcgcgtcttgcttgaaataatcgccaaagctgaagttgccgagcatttcgaaaaaagtgtggtgacgggcggtatagcctacgttttccaggtcgttgtgcttgccaccggcgcgtacgcatttctggctgctgactgcgcgggtgtacgcgcgcttttcctggcccaggaagcagtccttgaactggttcatccccgcgttagtgaacagcagggtagggtcattgcctgggatcaaggagctggaggagacacgggtgtgaccttgctcttcgaagaagcgaaggaaggcttcacggatttctgcgcttttcattaggttcttccacggaggctgcggccaaaggccagtgcgcaacatcatcagacgaagcgacggcaaagggccgcattatatcggccctttgccggtggtacagcgtgtttatgcgatagagaggctcaattagacggtctgcacagtcatttgcgcgaaaagtcgacgaatgtcgcgagcacttgctcgacctgcgcccggctcacatccaaatgagtgaccatgcgcaggcgcggtgcggcgctcagcttgatcccgcgttcggcggcaaacgccttcaaagcctgggcctgatcaccgatctgcacatagaccatgttggtctgcaccggctccacctcataacccgccttgcgcaactccccccccagccattgggcattggcgtggtcgtcggccaggcgctgcacctggtgatccagggcatacaaccctgcagcagccagggaaccggcctggcgcatgccgccaccgaccatcttgcgcaggcgccgggccttggcgatcagcgccgtggaaccgcacaacaccgagccgacaggcgcaccgaggcctttggacaggcacaccgacactgaatcgaagtgctgcgcgatctcccgtgcatccacccccagctttaccgctgcgttgtagagcctggcaccatccagatgcagggccaggccatgctcccgggtaaacgcgcgggctttggccaggtactccagcggcagcaccttgccctgcatggtgttttccaacgccaacagacgggtacgggcgaagtggaaatcgtctggcttgatggctgccagcacctggtccaggtccagtgagccatccgcctgcacttccagcggctgcggctggatcgagccgagcactgcggcaccaccaccctcgtatttgtaggtatgggcctgctggccgacgatgtactcctcgccgcgctcacagtgggccatcaacgccagcaggttgctcatggtgccggtgggcacgaacaacgccgcggcaaagcccaggcgcttggccagttcggcctccagccggttgacgctggggtcttcgccatacacgtcatcaccgctggcggcagtggccatcgcgtcgagcatgccgggggtgggttgggtcacggtgtcgctgcgcaggtcgatcacagacatgaaacaagcctctcgagggttcagtaagtgccttttgtgagtgattactgcgggcaacgccacggaatatcaagccccaactgcattcaatcgaataccaaccaaacaaaccgatatagcttatcgataccgcggtcgtgcagttttcgaaaaaccgtgttaaaaactctccgccgccagggttctggcggcaacgttctcagggcggggtgcaattccccaccggcggtaattacacgcaatgtgtatagcccgcgagcgcttggcgcctcgaactgctcacgtaggacggcgacaaggtcagcagacccggtgtgatcccggggccgacggtcatagtccggatgaagagagaacgggattggcacctgagggccgcgcacgatgtgtgctcgcgtacccttaaatcccattcgattcataacgccctgtttttttcttaaacaggagtcagaacatgcaacccaccgcaatcgacagcaaagccaagcaccaccacggcgaacgtatcgcgtttatccaggcttgctggcacaaggaaattgtcgaccagagccgtaaaggcttcctcgccgagatcatcgcccagggctaccaggaatcggacatcgatttcttcgaagtcggcggcgcctttgaaatgcccctgcacgccaagctgctggccaagaccggccgttacgccggtatcgtcgccgccgcgctggtagtggacggtggcatctaccgccacgaattcgtcgcccaatcggtggtcagcggcctgatgcaggtgcagctggaaaccgaagtgccggtgttctcggtgtccctgaccccgcatcacttccacgccggcagcgaacaccagaccttcttctacgagcacttcgtgcacaaaggccaggaagcagcacgcacctgcgccgacaccttgcacaaagtccgcgcgattcgccgtagcgagccacgcgcggtagcagtctaagcaacacggcaaagtacaaggtgggagggggcttgctcccgatggcagtgtgtcagtcacttaattgtcaactgacccaccgctatcgggggcaagccccctcccacatttggatcggatgaggctttgagcttcaggccaagccgacgtccgtcgtcggcacaatcaatatccccgcccgcaaaccattcttcaccttcgggttggggaagatgatgcgcgcgccctcctcctcgatcacccagcgggtcttggccacgtcttcggccagcagatagccctgggccaacggcgagaagttttccacatccgccggcaggtgcagcaggaaggcgtcgctgtgcttgatgacttcacgggagacggcaaacagttgcaggccgtcgaggctgctggtcggcggctcggtgccttcgatgatctgcttgaggcgtgtttccaggcgggacacgtccacgccctggttttgcccgaacggccgcgccttgcccaattccagggtgaacgcctcggcatcgagttgttcgtaggtaaacgcggtgaacgtgatcgaggtcttgttctgcaacagcaccgcttgcatgccggcagcgttcaggcgcgccagttcatggcgtgaatgctggcgaccttccttccatgggtacagggcgaactgctcgatcttcgagccgcgaatggccgtgtgcaggtcgtaatgcaggcgtgaacggcccggcaggctgaaaaaactgcgggccagttgctccagctcggcggcgcgcatggcctccggaccaatgtttttttcatgccgaccgttgaacagccggttgacgtccagttcgaggtaacgctcgccgcggcgcatggcctcggggttgccgaacaggaacagaatacgggtacggggcttgatctccccacgggcaatgccatgcaacaggcggtcgagcagttcgatcggcgcggtttcgttgccatggatgccggacgacagcagcaggtcgctgccgttgtccttcgcctcaggcgggcgcacttcgagtgcgccctcgctgagccagcgcatctgcacgccgtcgacagtcagttgaattttttgcgccggttcgcgaccggcgagggtcagttcaagcagtttgccaagggcgagcatacgcagcttccttagtggttgcagcctgggccgtggacgtgatcgtcgtcatcaccttcaacatcggccggttccatttccagttgcaggctcatcaggttggtggccaatgggcgcatcagcaggttggcatattcggcgtcgccctcttccacgtccacgccgatcagcagttggccacggccgtcgtgctggatccagatttccttgccctgccagaccacggcgacgcgggtgcaggaagtttccagctgggtgccgtcggtgtcttcaagaatcagtttcagggtgtcggtggtcataatagatagttctcagccgtacggcgttaattgatctggaaaggataaaccgcgcccagtttaaggatttgcgtcagttcatccagtgccgtccggcactcaagcagcaattgcgggtcagccaggtcgctttcgcgcaggctgtcgcggtagtgcttgccgacccactgggtcagggtgtcgtacaacggcgcggtcatgataacgcctggattcaccgccgccagctccgtttcgttcaacgctacgcgcaaacgcaggcacgccgggccgccaccgttctgcatgctttgcttgaggtcgaacaccttcacctcgcggatcaggccaccggcagcggtcaggttttgcagatactgccagacgcgttcattggcgcggcattcttccggcacgatcagcagcatcgaaccatcggcgcggctcagcagttggctgttgaacaggtatgaacgtaccgcgtcctcgacgctgacctgggcgcggggcacgcacaccgactggaagttaccccccagcttggccaacttgccttgcagctcgccgagcatctgttcggtattgaggaacgcgtcttcgtggtagaacagcacttcgccgttacccaccgcgatcacgtcgttgtggaataccccggcatcgatcaccgccgggttctgctgggcatagaccacaccgtcatcctgcaaaccgtgcaaacgcgcgacggcctgggaggcttcgagggtctggcgcgccgggtacttctgcggcgccgggtagcgggggtcgaacgcgctgcgaccgaacacgaaaaactcgacacccgcctcaccgtactcacggcagaaacgcgtgtggttggccgcgccttcatcgccgaactgcgccacggcgggcaacgcggcgtgatgggcgaagtgcttctgatcagcgaacatcgcccccagcacacgactggtggtcgggtgctcgatgctgcggtggtacttgcaattgaggttggcggcagtgaaatgcacgcggccatccgccgtatcggcgctcgggctgacggtggcggcgttggccacccacatgctcgacgccgagcagctcgcgaccagcaacggcatagcgtctttggccgcctgctggatcacttgcgcgtcggtgccgctgaaacccaggttgcgcaaggcggccacgtcaggacgttcctggggcgccaacacaccttgtacaaagcccatgtccatcagggctttcattttctgcaggccctgcaacgctgcttccttcgggttggaatgctgctggctgttgctctgggacgcgacgttgccgaaggacaaaccgccgtagttatgggtcggccccactagaccgtcaaaattgacttcataggatttcatcggcgaggctccacgaacatctgtttttataagcaatcttcagtactacagagatccaatgtgggagggggcaagccccctcccacctttaaatcagtgtgatgccgggggtcagcgtggcaggcaccaccaggctcggggtctcaagcgaggccaccgggtacgcacaataatccgccgcgtaataggcgctggcgcgatggttgcccgacgcccctaccccgccgaacggcgcggtactcgcggcgccggtcagttgtttgttccagttgacgataccggcacgactttccagccagaactgctggtagcgcgcttcggaatccgacaacaagcccgcggccaggccgtactgggtgttgttggcctcggcaatcgccgctgcaaagtcagcgtagcggatcacctgcaacaaggggccgaacagttcttcgtcttcacgctcggtcacaccggtcacgtcgatgatgcccggcgtgagcaacgcggcctgatcctgtggctgggtcatctccaacagcgccaccgcaccgttggccaacatcaattcctgggcgtccatcaaggctttggcggcgccgagggaaatcaccgagcccatgaacggcgctggttgctggtcaaacgcaccgacctcgatggtcgcgctgaccgccaccaggcgcgccagcaacgcatcgccccaggcaccttcgggcaccaacaggcgacgggcacaggtgcaacgttggccggcggagataaacgccgactggatgatggtgtagaccgccgcatccacatcggccacttcatcgaccaccagcgggttattgccgcccatctccagcgcgagaatcttgtccgggcgcccggagaattgctggtgcagatgattgccggtgcggctggagccagtgaagaacaacccgtcgatgcctgggttggccgccagggcgatgccggtttcccgcgcgccttgcagcaggttcagcacgcccgccggcaggccggcttcgatccagcactgcacagtcagctcagcgactttaggggtcagctcgctcggtttgaacagcacagtgttacccgccagcaaggccggaacgatatgcccgttcggcaagtggccggggaagttgtaagggccgaacaccgccaccacaccgtggggtttgtggcgcaatacggcggtggcatcgcccagcgagccgctcttctcgccggtgcgctcgcggtagctttgtaccgagatcgcgatcttgttggccatgctggtgacttcggtcgctgactcccacagcggcttgccggtttcctcaccaatgcagcgtgcgatttcgtcggcgcgttttttcagggtggcggtgaaggtctccagtacgccgatgcgctcttccagcgaacgtctggcccaggaggggaaagcctgacgcgcggcctgcacggcggactcgacctgttcggcggtggcgccattaccggcccacagcacctgctgggtcaccgggttgcgcgattcaaacagctcaccctggccagccagccagctacctgcgatgtacagcgaattcattatttcgactcccgagcagcggacaacggtacggcacgcacttgatcgcccaccaccaaacgcaggcgcttggcggtctgcgggtcgaccaccagggttccggctgcgaggcgggccggggcggcggtgatgcggcaatcttcgcgtttgcggttatggatcaggaacggcgtggcgtcgtcgcctggggtgccgatcgccaataccagtgtttcgctgtcgcgaacggcacggatcttctgggtctcacactccaccgcaggtcccgcgtcgaaaatatcgacgtagccctggtagctgaagccttcactcttgagcatgctcaacgccggttcggtatccgggtggaccttgccgatcacgttgcgcgcatcttcggaaaggaagcagctatacaacggaaacttcggcatcaactcggcgataaacgccttgttgcccacaccggtgaggtaatcggcctggctgaattccatcttgaagaagtgccggcccaggctttcccagaacggcgaacgcccggcgtcgttggacaccccgcgcatctcagcgatgatcttgttaccgaacaactgcgggaattcggcaatgaacagcaggcgcgccttggccagcatgcggccgttgaggccgctgcggtaatcggcgtgcaggaacaacgagcacagttcggaattgccggtgaggtcgttggccaggaacagcgtcggaatctcacggtagatgttcagctcctgggaggcgctgacggtcaagccaacccggaagttgtaccaaggctcacgcaagccgacggcgccggcgatggcggaaatgcccaccactcgaccctcgtcgttttccagcacgaacaggtagtcggcatcgccgcgcccggcgtcgccgcgaaaggttttttcggcccagcccacgcggtgggtcaggcgctcttcgttggccggcaaggtggtgaggccggtgccggtgctgcgcgccagatcaatcagggccggtaaatcgctgctgcgtacgggacgaacgatcatgctatctcctcgaacgggccgctgttgtcagccacccgcgaaactctctttttaaaccgctaccaggcgcacgctcgcaccttcgccaacacccagggcctcggccgctgccaggtccaacgtcaccggtttacccggcgcgtagtccagctccagcatcaccgcgcggtagtcctgcaattgcgcgttgctcaccaggtactggcgaccgacgcccttgaccatctcgccgatcttcaccggcactacgcggctctgggcgatcgagcgaatgcccgagacccgtgcgtgcagcgtcgggccgccgtcgaaaatatcgatgtaatggtcggtctcgaagccttcgcgcatcaggatgtcgaaggtgatctgcgcacgcgggtgcacctggcccatggcttcctgggcttcgtccggcagcagcggcacgtagatcgggtaatgcggcatcagctcggcgaggaaggtgcggcttttcagcccgcacagacgctcggcggcggcgtagttgaggtcgaagaagttgcggccgatggcgtcccagaatggcgagtcaccgttctcgtcgctgtagccgacgatctcggtcaccaccgagtcggcaaagcgctcgggatggctggcgacgaacagcaggcggccacgggaattgagttccgaccacggcgaaccgaccagctcgggcaccacgtagaaactggtgagcaggctgttgccggtgaggtcgtggcactgggaaagcacgtggatcttgttgtggatcttcagctcgcgggaagcgtgcacgaaggtctcgttacggaagctgtagaacggctcggagtaaccggccgacgcgacaatggccgagcagccggcgagcttgccggtctcggtgtcttcaagcacgaagaaatagctttcttcaccgttgaagctcacctcggcggcgaaagacgcttcgctcgcggcgatcttgtcgctcaggcgttccacgtcgtccggcaaggaggtgacaccaatcgggctgtccgcagccagacgctgtacctcgcccagatcagccatttgcgcggggcgcatcaccagcatggtgtcactccttaactcgaaaaactcataggaaaaaataccggacagttcctgattcaacgcaggtcaaatgtgggagggggcttgcccccgatagcagtctgtcagttgataaatcaggtggctgacccatcgctatcggggggcaagccccctcccacatgacacggtccggcaaataagggtgtatcaggcttgcgtcagcgtttttactgcacgttcaaaacggtccaggccttcctggatgtccgcgtcttccaccaccaggctcggcgcaaaacgcaccacgtcggggccggcctgcaggatcatcaggttttctttctcggccgcgttgaacacgtccttggccttgcctttgaacgcatcgctcagtacgcaaccgagcaacaggcccatgccgcgcacttcggtgaagatgccgtattgcttgccgatctgctccaggcgcgccttgaacagctcgtgcttggcattcacgccagccagcacctcaggggtgttgatcacgtcgatcaccgcttcggccaccgcgcacgccagcgggttgccgccgtaggtggtgccgtgggtgccgaccaccaggtgcttggccaggtcttcgcgagtgagcatggctgcaatcgggaaaccgccgcccaggctcttggcgctggtgaggatgtccggcaccacgccgtagtgctggtaggcgaacaggtggccgctgcggcccatgccggtctgtacttcgtcgaacaccagcaaggcgttgttggcgtcacacagctcacgagcaccttgcaggtaggccagttcggccggcagtacgccgccttcgccctggatcggctccagcaccacggcgcaggtcttgtccgacaccgcggctttcagcgcggccaagtcgttataaggaacgtgggtgatcccggtgattttagggccgaagccatcggagtacttggactggccaccgacgttgacggtaaacagcgtgcggccgtggaagctgttcagcgcggcgatgatctcgtacttctcggtgccgaaacggtcgaacgcgacacgacgggccagcttgaacgcggcctcgttggcttcggcgccggagttgcagaagaacacacgctcggcaaaggtggcgtcgatcagcttatgcgccaggcgcagggccggctcattggtgaacacgttggacacgtgccacagcttgttggcctgttcggtcagtgcaccgaccagcgccgggtgggcgtggcccaatacgttgaccgcgatgccgccggcaaagtcgatcagctcgcgaccagcctggtcccacacgcgcgaacctgcgccacgcacggggatgaaggcggcaggtgcgtagttgggaaccatgacctggtcgaaatcggcacgttgcaccggggcttgctcaacggacatcggagtctcctgaagaggaacgcctgcctggaactggcgggcgatgcagggattgtaaggacagttttcagtagggccttgtcgccaagcgacaacttcttatagcgccaacccgcgttttacgcgggtttacgccaatgcgacaaatagcatcgcaatggcgcagtttaaacgctgcgcgccgtttgcgtgagggccagacgtgccggcggcataactatctaaagtccggcatgccggggcggctgatttactcgtggtttcgagcccctcatggatccgagcatgacaaccccgacttctcctgtaccggcagtcagcgataacagccgccccgaccaagactttgaaccattgaccggcgccctgcccggctggctgctcagcgcgtccgtgcgccagcgcgaggcgttcaaaaaagctgcgcccctgcctttacccaccgccaacgccgcgcagcaagccgccttcaaacagctgaacggtgcacattggcaagcccagagacgcgtcgacaacgcgctcaaggatctcaaggatcccaaggcgttcggcaaacccttgcttgcagacgccttgaaacagcagttcaaccttgaactggatgtggaagcgacctttatccgcctatacatcccgctgaccatcccttggtttcccgtgcgctctggcgccgcccgcgcctggaccgtatcgctgctcgacgccgcactgcacaacttcgaacacaaggaaacccaggcggacgcttatgaaccggcctccacctacatcacccgtcccgacgcttccggccggttcgacaccttgccggcgatcaaacaccaactgccggtcgctgccttcgcccaactgtgtcgcgacctcgacctgggcgcccgttacatgcgctacctgcgtagcgggctgggcatggacagcccggtcgccagcgcggtgctgcaaaccaaggtcgacgccagccagaaagccgccctgcgcgcagcgctgcaactggcacggctgcagcaggatatccaggacgattacgcgcaggtgatagagggtttcatcgatggccgtaccggcctgcgcctcggcacaggtccggtgctgtgccatgaattcagcatgatgggtacaccgctgaccggtatcctgctgttcgcaccggatcttgaaaacacccgtagcgtgcggcgcctggtggcctatgtgccagatgacccggaacacccgctcaaggaatatcgctctgcgctggcattcaagcaggaactgacccggcaactgcgtacccaggactatcaggcgttcttcagtcgcttcgtggcccatgaacacctcggggcgtttttcgccgacctcagccagcgcctggagaaaatcacctggcaccccagtgatcaaggcaaaggtctggccccttggcgcgccgaacccaccgacgatcccacgctgcaattctccgccatcccgatcatgggcgatccgtgggtattcctctatcaatccaggctgaacaaaatcctcaacgacgcccgcaccctggcggtcgccaccgccaccgtggaccgcaacgcccgctgggcgcggtgggatgcgttcgtcaatgtggcctcctccattgtgaacacgctgctgatggtggttgcacccttcatcccggggcttggagagctgatgctgggctacatggcctatcaactgctcgacgacgtcttcgagggcatcgtcgattgggccgaagggctcgaccgcgaagcgtttgcacacctgatgagcctgctggaggctgcggttcaactggggctgtttacggccggcacgcaaatcggcgtgcctgagttacgcaaactgttgtcaccgcaaaccctggccttcatcgatcgtttcaaaccggtcaccctcgccaatggcgcccgccgctactggcaacccgacctcgagccttaccagcagaagctgcaattgccgccgcacctgggtattgacgcacgcggcctgcatgacgtgcgcaaggaatcgatcctgccgctggaaggcaaactctatgcggtgaaaaagtcccctgaggacggccagtaccgcatccaacacccaacacgggccgacgcctatcaaccccagttgcaccacaacgagcacggtacctggcggaccgaactcgaccaaccgctgcaatggaccaaacccaccctgctcggccgcctgggctaccgggcgcagggcctcagtgacgccgaccgcgagttggccctgaccctcagcggcacccctgaagacggcctgcgcaagatgcaccttcacagcgagcccctgccaccgttgctcgatgacgccctggcacggctgcgcatcgagcgcgacctggacaccctgatccagcgcctgaacagcgatgacccggcagtgtacggccgtatcgacccgcaggacctgctgcaactgctcaccgccaacggctcatggccacacacccggggcttgcgcttgctggatgatcagggccgtgtggcgtgggtcttcggcgatcagtccaagcctctggtgcaaattcatgaagcacaattgaccaacggtgacttgctcaaggcggtgctaaaggcgctgaccccggaagagatccgcgcacagttcggcgagcgcgccagcgacccgcaattgagcctggaaacccgcgcgcgcaacctgaggaagcggctggccgagatcgcacgcaagcatcgaggcgccctgttcgaatcgcgctatgggttccggcagcattccgcacacccccaggcccagcggctgatcgacagcgcccccggcttgcccgcatcggtcgccgaaaagttgctgggccaggcaaccgcgcaggaactgacggcactgcgcgaacagcgcacgccaccgcgcctggcgcaactggcccaggcggcccttaccgaggtacgcctgaaccgcgcctacgaggggcaacacctggactcgcacatcaacctcgacagcgaccaactgacgctgagcgcactgcgattgctgccaggctggtccaccgacgtcaacctgcaagcccggcaccgcaccatcgacgggccgctgtggcgcagcatcggccccgacaccgcccccatccgccgcagcctggtacgcctggacagcggccgctacgtgccctatgacgagcgcggcccgctgtccggcgagaccgacctctacaccgccatcctccacgccctacccgatgcccagcgcgatcagctgaacatcggcatccaccaaggccctgaactgcgcgaacgcctgcgccaacacccgccgccacgccacgagctgcgggtactgctgggcgccgagccggaacccgccgtcgaaaccctgcaactgctcggcaacgatgcgggttatgcccaacaaccgcgcaccgcgggcagcccggtgagcctgcagcaacgggcacgtaccctgtaccccggcctgagggatacccaactgcaagcactcattgaacagttgcagactcgcccgggcggcgcagcaacacagctcgctcaattggcccgggaatatgcacaactgaaccgagacctgctggcctggcaaacggatattccgacccaccacccgaccagcgcccaggcgttgagcacctgggagcggcgccaggaggaacagaaccgcttgaccattgcccatcagctcaagcaagcctggcgccgcgaaaccaggatcgacgattactacgaagacccggcccgcgacggccatgtgctgaacctgaacgccaactttctcggcgagctgccacgcctggacgcccagttcgatcacatttccatgctgctgttggacggctccgagtatctgcagggcgtgctgccctttctcagccgctttcccaggctgcgccagctgggggtcatgaacaccccgctggatgttctgcccgcacacataacctcgctgcctcagttgaattcactgcaattgagcaattgccggatcaccctcacgccggagagcctggcgcggctgtcggcgatgcatcagctgcgctcgctggacctgaacggcaacccgctcggcctcgtccccagtatcgaggccctgcctgaactggtcgccctggacctgtcaaataccggcatcgagcgcctgccggccggcctgctaagccgtacggagctacaagccgctatcttgaacgacaaccggatcagcacgttgccgcaggccatgttcgaattgtcggccgagtccagccgccgtttcgacctgtcgcgcaacccgctctcacgggcgacgctggagaaggtcaagacctactaccaggcacacggcacctacctggaggccaatgccctgcccgccgacatgcgtgacgcacaacggctgtttccgacgttccgcgacgagcagatcaaccggttcatcttcgacctgccgggcgacatagaggccggcagagtggccctggcgcaattggccgccgactatcagaccctgaccgaggaactccagacctgggcccgggcccccgccctctccgacgtagagcgcggacgccgaaccgtactcaaggaactgctggaacgcagttggcggcgcgaaaccccgcaacagacccgctggctcaactccctggaaatctcaagcgccctggccggtgagctaccgcagttgagcatccgcttcgagcatatcggcggcattcgtatcgagggtaacggtcgccccctgcacctggatcacttcctgtccagcttcaacaagctgaacgttgtcgacatcagcgacgcgccgctgggggatatccccgcgccgttgttcaacctgcaacgcctggagtttctcggcctgccccgatgctcgatcacgctgtccgccacttccgtgcgggggctggaagggttgaaccgcctggcgttcctggacctcaaccacaacccactgggactcatgccggacttcaaccgactccctcaactgagccgcgtgcacctgcgcaacaccggcctgcgcgaagtgccgaccggcctgctgagcagcgaactgcatgcggcggttgacctgagcaacaatgccattgaggacctgcctgcgagcctctctgatttgcccgacgcgatcgcccggggcgttgacctgtcgggcaacccgttgtccgggcaggcattggaacggatcaaggcctattgccaacgcaccggagagttcttcagagccagggtttccgacgctcagcgcgcacgcgtgcaacagctctacccgaccttcatcgccagcgaggccgatcgtttcagcttcaaactgccaggcacgatgagcgacatagacgctgaaatgcgcgagctcgaagaggaataccgccagctggacaccgacctggatgaatggattgtcgatgtgccgacgcaccacccgatcctcgacatccccctggacgaacagacacgcgccgaacagcaattggtaaggcgcaatttcaagacattgctcaaacaagcctggcgttatgaaagccccgaagacgaagagagcctcgatgacgatctgacccatgcagtgacactcgaaacgccgatactcggcgcactgccacaactcaatgcgcgcttcgagcatgtgacttcgttcgaactgatcagcgacggcacaaccaccgaagtcgacggcaccctcagggggttccccgagctgcagacactgaccctcaacagatgctcattgcaaaccctgccgacgtcgattttcagcatgccgcacctgtcctccctggaccttgccgaatgccgactgagcttgacgcccgaaagtgcgcgctcactggaaaacttgaatggcattgaattcctcgacctgagcaacaaccctctgggccacgcgccagctgtcagccgtttgtatcagctgagctcgctgcacctgcgcgatgcccaattgcgtgaggttcccgagggagtattccaactaccgtccctgcatacgctggacctgagcaacaacctgatcgagacgttgcccgaggccatactggaagtcgcaacaaccctcgacaacgactccgacctgcgcggcaacccgctgtctgagcacagtctggaattgttgcggcagtactacctgcgcaccggttttgccctgtatgtccaggcggctacacgggatgccgcgggcaaccggttgattccaccgcagggcccgccagaagaggagtgaagcaggcgttcaaccgcgttccgacggcaccgatgacagttcgaacgggctgctgctgcgccgctggttgcggtcttcacggggggtggcgccgaagaaattgcggtaggcgctggagaaatgcggccccgaggagaagccgcacgacaggccgatctggatgatcgacttgctggtttgcatgagcatctggcgggccttgttcaggcgcagttccaggtagtactggctggggacgcggttgaggtattgcttgaagatgcgttccagttgtcgtcgcgacacgcagacgtgctgggcaatttcgtcggtggtcagcggttcctcgatgttggcttccatcagcaacaccgcctgggtcagcttcggatggctggaacccaggcggttttgcagcgggatacgctggcgttcgccgccttcgcggatacgctctaccaccagttcctcggacaccgcaccggccagttccgcgccgtgatcacgggccaataccgccagcaacaggtcgagcaccgacatgccaccgcaggcggtgagacggtcgcggtcccagtcgaacagatggctggtggcgatgaccttggggaagcgctcggcgaaatcgtcctgccagcgccaatgcacggcagcacggtagccatcgagcaggccgagctgggccaacggatacacaccggccgacagaccaccgatcacacacccggctcgcacaagctgcttgagcgcagtgctcagttgcgaggcaatgacagtaggtggctcatccgccagcaggaacagcttctggaaaccctcgagcttgccggcccacggctcgcccggcagttgccaggcaccttcggtggccggttctgcaagcaggaacgacagctcgtagaccacatccggatgcacccgctgggcaacgcgcaaggcctcctcagccagcgcaagcgtcagggcttttgtgctgggccaaatcaggaaaccaattttgtgggcggtcatggagtgctatccgaagccagtaacagtaatgaagacaagggccaatgctagcccgtaatcgagtacaaatctcaaaaacgatgcatatccaatgtgggagggggcttgccccctcccacacaaagcaaaccccataggcaggaattacttcaggctgccggacaggaactgctgcaaacgctcggactgcgggttcaccaacacttcccgtggattgccgcgctcttcgacgatgcctttgtgcaagaacaccaactggttcgacacctcacgggcaaagcccatttcgtgggtcaccaccaccatggtacggccttcctgggccaggtcctgcatcaccttgagcacttcgccgaccagttccgggtccagcgccgaggtgggttcgtcgaacagcatcacctccggctccatcgccagggcacgggcaatcgccacgcgctgctgctcgccaccggacatgtggccggggaacgcatccttgcgatggcccacgccgactttggccaggtaatgctcagccttttcacgggcttctttcttcgacatgccgagcacatgcaccggcgcttccatcacgttttcaagcgcggtcatgtgcgaccacaggttgaaatgctggaacaccatggacaggcgcgaacgcatgcgctgcagttgcttggggtcggcggccttcatggcgccgtccttgttggccaccaacttcagctcttcgttgttgagcaggatcttgccggcgtggggttgctccagcaggttgatgcagcgcaaaaaggtacttttgcccgaaccactggaaccgatgatgctgatcacatcaccggccgcggcggccagggacacacctttgagcacttcatgactgccatagcgtttatgcaggtcttggacttcaagtttgtacatgcggtcggttctcacaaaaacaggtggtcagtcgttgagcaagcgcccgtgacgcagcgcttcgcgccccgccaccttggccagccagaaacccgcttgggcataacgtagccgttcaacggcaaacagcacccccgaggtgcccgcgcacagggtgctgacgcggtcttccagggggtcaatcacttcaaagatcggttcgcctttttcgacccagtcaccggctttacgcaggtaactgatcaccccggcgtggggcgcgaacagcagttcagtgccttcaaacggtacgccttcgcacggctcgtattgcggcgcgggccattcacccttgatcaagccctgctcggcaaggaacgccaggatgccttcggcgtggaagaccgcttcgtcgcggccggtatcagcctggccacccagttccagagtcgtcgccaggcaggccagcgggacctgtgcgtcgggaaacgcctgggacaagcgtagccacggcagcgaacaggcttcatcgaacgagctgccgccggagtcttccgccagcaggccgactttcagattcaaatgggccgacagcgaacgccactgcggccaatgctgcggcagcgcatacatgtgcagcgcagcttcggcatcacaatgcaggtcgagcaccacatcggcggtgcaggcatggctcagcaggatgcgctgcatgccctgcaactggctgctcggctcgggcagcgcgttaagcgtgtcactcatggcctggcggatcatgcgcacgttggcgtggggatcatcgcccagcttgccgtcaagcaatgcggcaaccggctcgctcaactcgacgaaatcgcggttgaaattcttgccgctgccgacctcgaaacgcccctggtggctgccttgcagcagttggcccaggcccatcgggttggccaccggcaccagctcgatcacgccattgagcgcaccttgctgttccagttcgacaaggcgctttttcagctcccacgcggcgcgcatgccgggcagttcgtcggcgtgcaggctggcctggatataggccttgcgctcgcccttgccgaaacggaacacgctcagttggcgctcgcagcccaggtgactccagggcaaccggtgatcgatacgttgcatatcagtgcttcctcggcgccaggtagctcagccagcggcgctcggccaacttgaacaggcgcaccaggatgaaggtcaggcacaggtagaacacaccggcggtgatatacgcctcgaacggcaagtagaactgcgcgttcacggtgcgtgcggcaccggtgatgtcgatcagggtgacgatggaggccaggctggtggtctgcagcatcatgatcacttcgttgctgtactgcggcagcgcacgacgcagggccgacggcagcaggatacggcggtacagcttgtagcgcgacatgcccatggccttggccgcctcgatctcgccattaggcgtggccttgaggctgccggcaatgatctcggcggtgtaggcgctggtgttgatcgcaaaggccaggcacgcgcagaaggtggcgctggacagcagtggccacaggaaactctcgcgcaccgcctcgaactgggccaggccgtagtagatcaagaacagctgcaccagcatcggcgtgccgcgaatcacgtaggtatagagccaggccgcaccattgacgatcggctgcttggacacgcgcatcaggcccaggggcaaggccgcgagcaggccgaagaacagcgagatggcgagcagtttcagggtggtcaccaggccgccgaggtacagcggcatggcctcccagatgacgttgtagtcgaagatcatagatcagccgcccttacgcctaccgagtagcgcttctcaagatgacgcagggccagcaacgacacgctggtgatcaccaggtacatcgccgccactgcgaggaagaaggtaaaaggctcgcgggtggcgtctgccgcctgcttggccttgaacatcatgtcttgcaggcccaccaccgaaatcagcgcggtggccttggtgagtaccagccagttgttggtgaaaccggggatggccagacggatcatctgcggcaccatcacccggaagaacacctggaaactgctcatgccatacgccaggccggcttcggcctggcccttgggaatggccatgaaggcgccacggaaggtttccgagagataggcgccgaagatgaaacccagggtgccgataccggcggccaaggggttcaagtcgatatagtcgtcatagccgagcatcggcgcgacgcggttgagcaggtcctggccgccgtagaaaatcagcaggatcagtaccaggtcggggatcccgcggatcaccgtggagtacaagtcacccaaccaagccaaccagcgcaccggcgacaggcgtaacgcgaccccgatcagacccagaacaatggccaaggccatggacgacaaggcgagctgaagcgtcaaccatgcgccatcgaggatgacggccccgtagcctttcaacatgattcaggtcctcgaaaagggggatgaaaaaatggcgcaaacctcaggaattctgttgcttgcgccatttgggacagacagctgcgacgagttacttagggtcagcgccgtaaatatcgaagtcgaagtacttgtcctggattttcttgtattcgccgttggcacggatcgccgcgatggccgcgttgatcttgtccagttcggccttgtcgcctttacgcacagcgataccgatgccgtcgccgaagtacttggcgtcggtgaactgcgggcccacgaacgcgtagcctttaccggccggggttttcaggaagccgtcttgcagcagggtggcatcagccacggtaccgtcgaggcgaccggcttccacgtccaggtagatttcgttctgcgagctgtaaggcacaaccgtgacgcctttaggggccaggacttccttggcgaaacgatcgtggatcgaaccacgttgcacaccgatcttcttgcctttcaattcatccaggctgtcgctgacggtggtgccttccttcatcaccagctgcgctgggctcaggtagtagcggttggtgaagtccacggacttcttgcggtcgtcggtgatggacatggacgacaggatcgcgtcgatcttgcgcactttcagcgcagggatcaggccgtcgaattcctgctcaacccacgtgcacttgactttcatctctgcgcacagggcgttgccgatgtcgtagtcaaaaccgacgatgctgccatccggcgccttagaggcaaacggagggtaagccgcttcgataccaatcttcaggggcttttcatcagcgaaagcctgcatggacagcacggacagcgccagggcgcccaacagcacgagtttcttcatcttgggactccatcggtatagggcaaaacagcagtatgagccatggcccacgatgcggcgtaagggaaaccgaatagcggtgctgcgtcctacaccgattcaacatcggagacgacgagcgagtgatcggcattctaacgacaggctggaagccgatatttcctcaatgcgacaacaatttacagaagcaccgagaaagcggatccaactcattgacagcctctggattttatgcagagacaaaagacattaaacctgtagacgctgcaaattgcgggcctattattcgcaaacccttctggcacggcaagtctggcgtttaatcttatttcctggggtgtctggaatggggtttttcggggcgcagacgtagcacattgcctcaggtttgggcgggaggttacacattgagggttggcggtaacattcagaaacgccctacacgaaaaaccgatatttatttgactggcgtggatcccatgtgggagggggcttgcccccgatagcggtgtgtcagtgaaaggcatttcaactgaaccacggcaatcgggggcaagccccctcccacactggatctccggtgcttttgaggccgctcaaaaaagccccacccggcttacaccgggtggggctttatctgactatcccgccttacgcgacgttcatggtcttgtgcgtctcgatcaaatgcgccaccacacccgggtccgccagggtggagatatcccccagcccgtcgtactcagccgtggcaatcttgcgcaggatacgccgcatgattttccccgaacgcgtcttcggcaagcccggcgcccactggatcacgtccggcgaagcaatcggcccgatctccttgcgcacccagtttttcagctccagacgcagcgcctcgttcggctcttcgccgtttttgagggtgacatacacatagatgccctggcccttgatgtcgtgcggcacacccaccaccgccgcttcggcgactttagggtgggcaaccatggcactttcgatctcggcggtgcccatgcggtggccggacacgttcagcacgtcgtccacacggccggtgatccagtagtaaccgtcttcgtcacgacgcgcaccgtcaccggtgaagtacatgccacggaatgtcttgaagtaggtgtcgacaaaacggtcatggtcgccgaacagggtacgtgcctggcctggccacgaatcgaggatcaccaggttgccttcggccgcgccttcaatcaggttgcccaggttatccaccaacgccggcaccacgccgaagaacggccgtgccgccgaacccggtttgagcgcatgggcgcccggcagcgggctcatcatgttgccgccggtttcggtctgccaccaggtatcgacaatcgggcaacgggattggccgacgttcttgtagtaccagtcccacgcctctgggttaattggctcacccaccgaaccgagcaggcgcaggctggagccgtctgcgccttcgcacgcagcagtgccggacgccatcatggcgcggatcgcggtcggggcggtgtaaaggatattgaccttgtgcttgtcgacaattttcgccacccgcgtgatgtccgggtagttcggcacgccttcgaacagcacggtggtcgcgccgttggacagcggcccgtagacaatataggtgtggccggtgacccagccgacgtcggcggtgcaccagtagatttcgcccgggcggtagtcgaacacgcgctcgtgggtcaggccggcgtacaacagatagccgccggtggtgtgctgcacgcccttgggcttgccggtggagccggaggtgtagaggatgaacagcgcttcttcagcacccatctccttgggcgcacacacagtgcccgctactttcatcaggtcttcgtaccagatgtcacggtgctggttccacttgatctggccgttggtgcgcttgcacacgatgactttctggatgctgctggtttccgggttggtcagggcgtcgtcgacgttggccttcagcggaatcttcttaccggcacgaataccttcgtcggcagtgatcaccaccttcgacttacagtcgatgatgcgaccggccagggcctccggcgagaaaccaccaaacaccacggaatgaatcgcaccgatacgggtacaggccagcatggcgaccacggcttcggggatcatcggcatatagatagtcaccacgtcgccgcggtgcacatcctggccgcgcagggcgttggcgaacttgcagacttcttcgtgcagctcgcggtaggtgatgttgcggctctcggcagggtcgtcgccctcccagatgatcgcaatttgatcgccacgctcggcgaggtgacggtccaggcagttgtaggaaacgttcagggtgccatcggcgaaccacttgatgtcgacgtggtgatcgtcgaaagaggtctgcttcaccgtggtgaaaggcttgatccagtcaaggcgcttggcttgctcgcgccagaagccatcggggttgaccaccgactgctggtacatggccttgtaggtcgcctcgtcggtcagcgtgttggctgctacttcggggcgaacggggtacagggaagccgcactcatctttcttacctcggtgacatagttgttgttgtatggccctgttgtagccggggccgacctatagaaccattcgacgatggtagtaacaagcccctacaaattgccctgatatccccgtttgcacctctagcccgcgggccgtggcgctttgcggctttgtgaaaaaagctttaccacaggattgttacaaaaaccgccaatagtgtttatcaaaagcacgggtatatgaatataacgtgagggcctaaaatcacttccgccaacaaggcactgtagttaaatacagcagtgattaacaacgcaacagcccccacgaaggcaacgttaatccgaacttcccaactcttaagttacacacgtggcctcacaagggccccgtgacccctttcgccctgaagaaggtaaatagagaaatgaaagctttagtagttatggccctcagcagcttgtgcgccaccgccgccctggccgacgaagccccgactgacgtagctggcagcaaccctccgatcgttgaagactacacttacagcacccatctggatgtggcaaaagtactgtccatgagcagtattccggaagtgtgcgaagtggtaccggtgaagatggaatatgaagactcacagggtcagcgtcatatacttaattaccatgtgatgggcaatggttgttctaacgggtaatcacttggttagtttgaacttattcgccgcaagaaatggttcttgcggcaaagcaccgccccccttcccccctcgctgcacatcctcaaaaaaaatcctgccgctcgcccctccagccaaccccaataaacccgagccttggctcgaaaagcaggctttttgtctgcgatccgtgaccatccgccacaacacaaagccgattttttccctataatgcgcgggtaaatcgggcctgcaatatccctttacacagggatgaagagccagacctgaggcctcccgctggagcaagcaaccaccgctccgcacctcaagcctcacgcagagcacccgtaaccctattccgtttaatgcgtgcgctagctgcaacaaacgattccttaagatccaccgcggccctgggggccgtgtgaacacccaaccatccggtttcacacgggcacctttgagccctcacgcaggagacgacacgtcatgctgagctgggacgaattcgacaaagaagaagaaggcgaagtggccaccaaaggcgccaacgccggccacgccaccgaagccaacatggaccgcctcgacggtgccggcgctgccgccgccatcgaagcccgcgccgtcaccgccagtgactccgccgccatcgtccgcgccaaggccgccctcgacaaactcgacgtcgccgaaggcctcgccgaactcgaaggcgcctccgcccgtgtcgccgttgacgaaaagcgcatgatcaactgccgcgccgacctcaaccaactcgtacccttcaagtacgactgggcctggcagaagtacctcgacggctgcgccaaccactggatgccgcaagaggtcaacatgaccgccgacatcgccctgtggaaaaaccccgaaggcctgaccgacgacgagcgtcg

SEQ ID NO: 14 - DNA, 567 bp, Pseudomonas nodulensis
tacacccgctcgatctccgatccgaagttcgaaaccggcaccgtcgagaccgacaaagaactgctgcgcaacctggtcgcctactactgcgtgctggaaggcatcttcttctattgcggcttcacccagattttgtcgatgggccgtcgcaacaaaatgaccggcgtggccgagcagttccagtacatcctgcgcgatgagtcgatgcacctgaacttcggtatcgatgtgatcaaccagatcaagatcgaaaacccacacctgtgggatgccgagatgaaggaagaagcgacccagatgatcctgcaagggactcagctggagattgaatatgctcgtgacaccatgccgcgtggggtgctgggcatgaatgcggcgatgatggaagactacttgaagttcatcgccaaccgtcgtctgtcgcagattggcttgaaggaagagtacccaggtaccaccaacccgttcccgtggatgagcgaaatcatggacttgaagaaagagaaaaacttcttcgagacccgtgtgatcgagtaccagactggcggcgcgctgagctgggattga

SEQ ID NO: 15 - DNA, 475614 bp, Pseudomonas nodulensis
  misc_feature (35745)..(35820): n is a, c, g, or t
  misc_feature (140053)..(140087): n is a, c, g, or t
  misc_feature (378810)..(378885): n is a, c, g, or t
caggtaccaccaacccgttcccgtggatgagcgaaatcatggacttgaagaaagagaaaaacttcttcgagacccgtgtgatcgagtaccagactggcggcgcgctgagctgggattgattcctaagccaagcaaccccatgaagccctgacgtgttcagggcttttttgtgcgcggtgaattgctacttcttgaagcacatcaggctgaccacctcgcccagaagggttcggatcgcaccaccaatgctgtagccttgtgccccaattgccatcagcgttgtcaccggtcgagtgaccgggatgccttcaccgaagggctttacgccaaagtcggaagattggcacgggagtagactcccgctgtcacacctgatgcacactcaataaatacccgataggaccgaggccaacccgtgaacccagacatgctcgaagccggccccgctgacgccaaagtactttccgtctttgacttcgacggcaccctgacccaccacgacagtttcgtgcccttcctcaagtttgcctttggccccggcgagttctacggccggatgctcaagctggcggtgccggggctgcgttttctggtgcggcagatcagccgggatgagttgaaggcgcagttgatccgcacctttatgaccggggtggagaaggcatgggtgcaacagaaagccgaggagtattgccagaagacctgggcgcggctgatgcggccgacaggggtgttatcggtggagcaggagttgggatccggggcggaggtcacgttgtgttcggcgtcgccggcattggtgttacagccgtttgccaatcggctggggatcaagctgatcggcacggagcttgaggtggtcgacggggtgttgaccggcaagctcaccgggaataactgccgatgcgagaacaaggtgctgcggcttgaggcggtgtacggggatttgggcgactatcggctgcgggcctggggcgatacgcgtggggatcgggagttgctggcggcggcgcaggatgcgcattttcggcattttcatgcgaagaagaagcgggctcggttgcagcgatgatgcgggtgggtggggttggcgggtagaccgagggtcgcgcactagcatggggtgccagtgcgcggatggcccattccgatcaatcgtcaccgctacccaattcttgatcttcaaatgtggatcgcaccgcttccacaacccgttcggctaggtgaatcacttccagctgcggataagctttcttcaatttccccgatacctgccagccattttcctttaacgaccgaatgactcggtttgcgtcctgatcaggcatttccagcacttcttttagccgttcctgggcgcgctgaaagatgaccaacacacgcgcttcatcagccatctctatacgaaccgtgtgcgccactacctgtgccgtatacaagacttgttcggtcaagtcggggtagcgccacgcgaattgcgcatcgtcgtagtcatcgaagaccagattgctgcgggttccgtcctcgtagactacaagttctccaaatcgataggagccagcgtagcgttgcatgaatggccgcgaaaatgcctccagcgtacgatcgtaacgcgcccggaaatcaatcgaacttgtgattgtggccgacactggcaagattacgccttcaggcaccgccttatcacggatcaaggtatcgttgatcagaaagcgatggatccgaccattgccgtctcgcatggggtggatatagacaaaagcaaaagcgattacagcggtccgggccagcggctcagcgccccgtgttgccaactcgaatgctttcaagccgtcgagcaattgcattagcacctcaaatggcggcgcaatgtagtgaacgatatcctcgcgcatagtggcctgccccacgaagaccggtgagtgccgcaagcccagccctagcgcctcttcccccaaaataccggcttgcaaggtgtgcaggctttcattactcaacggattctcgatgtgaccacagtacttggcgatcacgtgggcaaaccgctggatcctgtcggctttgtctgcctctctctcgatcaaaaagctggcacgcgactccttgaacgtcagccaactcgccgtgcgcatcaggatatcagcgccaaaggtctggttcagctcccccagtgctgcgcccagatcaaactgcaacgcttcttgcacggcttcggtgcgacggatcaagggggagaacgcaggtacgccgggaagattatcgttgatgcgccagcgccttatacgcaaaggctcaacgcgggtcaggtaatgctgtgatgaaacagcatcgacatagccgccattggtaacatctggtacatcaaggtgcagtccggttaaccactcgtacaggaatccggtgcggcgggcatattgaccaaaaggcgtttgccggcaccaggcttcgacgggctcagggccggctgcagcaaataggcgagcgaagaattcgaggtgaatttcttcgtacttgagcccgaactcgaaatgccctgcaaagtcgtccgagggttggtagctgagggggtacttacgctcgacatgtccattgctctcgtggctcatgcgggtcgtaccgattgccgattcgacgcgcagtggctgtgccagcgagatacggtagcggtcagcgagtgccttgaagcctacctgcatggtcgaatcccctaacgaaccctaaaaaacgataactattagggaatagtaggcgaaaacgataattttgtgagtacgaaaacgctaatgcgctcttaaatttgctaacaaatcagcaatttcatttgaaaacgataacaacctaaagggaagcgatccgaatgaatggggccgtcaggagaccgaggcgatcccttcgaagcctcgctggggctcgacagctcccacagttgatctctgtcgctcggggggacggtgtttggcttgagtgttatgtcgtggctttgaggtccacgcccaaggctgttgcgaaggcttttaccatcgggctgcgcggggcgctgtggcgcaggatcaggttgaacgcggtgctcaggtgaacctgttccgggcacagtgcgcgtaggcgcccttcccttaccaatggcgcggcgtagtgttccggcaggaagccgaggaagcggccggtgaggaccaggatcgcgacagcttccacttgtgaggccgaggcggactggctgtcgtagttgacgaagttggccttgtcgcggtggatcgcataccgatggttcaccacttcgtattggcgcaagacctcgggcgtgaggtcgtttgcgtcgaagagtgggtgtcctacggcacagtaggcgtgggccttttcttcatacagcgggaaataatcgaattcttcacgccgttgatacaccggcacgataccgacgatcagccgcccttcgaccacgccgcgttcaacttcgtccaattgcgaggcatgtaggcgcaatctaattttcggcgattcgctgtgcaatttccctagcgcggtaattagcggggaattaacgtcggacacggtgttatcaattacgcccacactaaggtcgccaataagctcgttttgcgccgaactaagcttgtcgcgaaaactgtctaccgaggtaaataactcgatggacgcctgatacaccaacttgccttcttcggtcaggccaaacccttctcggccccgggtgcacaggcgcatgccgatgcggatctcgaggtcggagatctgtttactgatggccgccaggcccacgttcagctcgttttgcgcggcgctgaagccgccggcttcgactacggccatgaacacgcgcagcaatttgaagtccagcccgctcagttgcaggggcggtcttgtgccgggtttgggtggcaggtttccagaagtggaaagtggggtttccataatacgcgttgacctcaagtgccatattcaacaggcttcaacccaatccttgaacatagccaggcggcgataatgaacataaacatccgcccttggcaaccttgaatacggcgcgtcagacgctggttcagtctagttgaaaacttatttttactgcctccgactcttctaaaaacaagcgtgaggaacatccatgtcccagcccaccgaccgcctttggggcgctcgtttcaagaccggcccatctgctgcattggccgcgttgtcgcgttgccctgagcgctatttccgcctgacgccctacgacctggccggctcccgcgcccatgcccgtgagttgcagcgcgcaggtctgctggatgagtcggagaccctgcgcaccctcgacgcgctggacggtattggtgcggacttcgccgccggcacgctgcatccgaccctggatgacgaggacgtgcacacctttatcgaacgcgtattgactgaacgcctcggcgccctgggcggcaagctgcgtgccgggcgttcgcgtaatgatcaaaccgccaatgacctgcgccttttcctacgcgaccatgcgcgcaccatcaccaccgaggtgttgggtttgcagcaggcgttggtggaacaggccgagcaacatgtggaaagcatctgtcctgggttcacccacttgcagcaggcgcaaccgattgtgttcgcccaccacttgctggctcacgcccagtcgatgttgcgcgatgtgcaacgcctggtggattgggatacgcgtacggcgttgtcgcctttgggggcagcagcgatggccggttcggcgattgcacgccagcctgagcattcggccaaggaaatgggctacaccgggccgtgcgaaaactccatcgacgctgtcgccagccgtgaccatgtggcggagttcctgtttgtggcgggcatgctcggggtgaatatttcgcgcctgtccgaagagttttgcctgtggtcttcgcggcagtttcgctgggtggtgctggacgatgcctacgccactggcagctcgatcatgccgcagaagaagaacccggatattgccgagttggcgcggggcaaggctgggcgcttgattggcaacctgaccgggttgatgtcgacgctcaagtcattgccgctgtcgtacaaccgcgatttgagtgaagacaagcacagcgtgttggacagtgtggacaccttgctgctggtgctgccggcgatggccgggatggttgcgaccatgaaggtgcaggtggaagagcttaggcgtcaggcgccgatggggttcaccttggcaacggaagtggcggattggttggccactcgcggcgtgccgttcaaggaggcgcatgagattaccggcgccttggtgcaggcctgtgagaagcatgagattgaactgtgggaagcctcgccggcgatgttggcggaggtggacgcgcggttgacgccggaggtgcgcgattgcctgaccctggaagcggcgattgcagcgcgcagtgggtggggtgggacggcgccggagcgggttcgggagcagattgggcggttgaaagcggccttggccgaacagcaacagtggacagagagttaccagggatttcggatttaagcctgcaaccccgtggtgtctggtccggcgctttcgcaggcaagccagctcccacattggaccgagtacatcagtaccagcgtcatcagtttttggagagtcaccatgagccaaaccccggccgagcgcttggcagccgagcgcaagttgtccgaaaaccagttcgatatcacccagtacgagcacgtaccgcgtcgatattacgggcggatgttttttgccacgttgatcgtgatcgtgttggccgcgctgttgcgtgccttcgccaacggtcagatcgaatggtcctacatcgggcagttcctcacgtctgaggccatcctctggggcctggtcaacaccatcgtcatgtcgatcctggccatggcgctgggcgtggtgatcggggtgatcacggcaatcatgcgcatgtcggccaacccgatcctgcgctatgtggccatcacctacacttggctgttccgcggcacgccgttgatcctgcaactgctgctgtggttcaacctggcgctgatcttcccggtgatcgcgattccaggcctgttcagtatcgacactgtcgacctgatgacgccgttcgtggccgccctgctgggcctgagtatcaaccagggtgcctacaccgccgaagtggtgcgcgccggtttgctctcggtcgacaccggccagtacgaagccgccaagtccataggcatgccgagcctgcaagcgttgcgtagggtgattctgccgcaggcgatgcgggtgatcattccgcctgtaggcaacgagttcatcagcatggtgaaaatgaccagcctggccagcgtgatccagtactcggagctgctgcacaacgcgcaaaacatctactacgccaacgcccgggtcatggagctgctgattgtggccggcatctggtacctggcggtggtgactgttctttcatttggccaaagccgccttgagcgccgctttgcccgcggcgccggcaagcgttcgtaagtctgggttgaggagatttgccccatgagaagcatcgtcaaggccgtcaacctgaacaagtattacgaccagtatcacgcgctgcgcgatatcaatatcgaggtcgagcaaggcgaagtgatgtgcatcatcggcccgtccggctcgggtaaaagtaccctgctgcgctgcgtcaaccagttggaaaaaatcgataagggcggtctgtgggtcgacggcgaactggtgggttaccgggtcgtcggcaacaagctgcatgagatgaacgaatcgcagattgcccgccagcggttggccaccggcatggtgttccagcgcttcaatttgttcccgcacatgaccgtgttgcaaaacatcatcgaaggcccgtgccaggtgctcaagcgctcgcccaaggaagccaccgaggatgccctggagttgctggcccgcgtcggcctggcggacaaacgcaatgcctatccggtggagttgtccggcggccagcaacaacgcgtggcgattgcccgtgcactggcgatgcgccccaagctgatgctgtttgacgaacccacgtcagccctcgacccggagctggtaggagaagtgctgtcggtgatgcgcgatttggccaccaccggcatgaccatgatcgtggtcacccatgagttgggcttcgcccgcgaagtctccaaccgcatggtgtttatggatgccggccagattgtggaagccggcagccccgaagaaattctaataagcccacaaaacccgcgtacccaaagctttatttctgccgttcgcacttaactaaaaaacaaacgagaacgcccccatgaagaaaatgtttatccccacgttgctcgcaggcctgatggcctcttccgttgttttcgcggcattgccggcggcaatcaaggacaagggtgagatcagcgcggccatcgtgccgaactacccgccgatggacttcaaggacccggccaccaacaagatcaccggcctggatttcgacttgggcaacgccctcgccgagcgcctgggcgtgaagatcaagtggcaggaaaccggcttcgagcagatgctcagtggcctgaccaccaagcgcgtggacatcgtgctgtcgggcatgaccgacaccgccgagcgccaaaaggcggtgacctttatcgactacttcaccagcggcccgcagctgtacaccctggccaagcgtgaagacctcaaggaattgactgacctgtgcggtaaaaaagtcggcaccagccgtcgcaccacctggccgtcggaaattgccgcgtggagcaaggaaaactgcgaagccgccggtaagccggcgatcgtggtgatcggcactgagggctcggcggatgcgcgggcgcagttgcagcagaaccgcctggacgctgcgatgcagggcagcgagaccattccttatttgatgtcgttggacaagggcaagtacaagccggtggggttggcgatttccaagcagttcaccggacttgggattgagaagagcaatacggagttggtcacggcgatcagtgaagcgttgcaaggcatgatcgatgacggcacctacggcaagatcctgaagaagtgggacctggagcaaggtgcggtagagaagatcaccatcaactccggccaataactcgatctgaacaatgtgggagggggcttgctcccaatagcggtctatcagccaagcatctggtgactgagccaccgccatcgggggcaagccccctcccaccctggattttcgttgtccacaaaataacaaggacacccgccccaccgtggccacctactccctggtaatccgccgcctgatgatttgctcgctgaccatcgtggtcagccgcgccatgaccagcccgttgctggccctgttgctgagtacccgcctgggcctgaaccagcaggacatcggcttgctgatgggcatcgcggtgtttatcgcgacattgctgggcctgtacggtggctacatcatcgaccgcctggaaaagcgcaagctgctgatcctggccatgctctccagctccatcggttttctattgctgacctttgccagcaacctctacctcaccaccctgaccctggtcatcaccgaagcggcgtcggcgctgttcctgattggctcaaaagccatcatcagcgagaacctgccggtgggcgagcgtgccaaggtgttttccctgcgctacacactgaccaacgtcggctacgccacaggcccgatggtcggcgtcgtgattgccggccacatgcaactggcaccgttcctgatcgccagtgcgatcgcctttggcagcctgttcctgatgattggcatcccgcccacccaacgggatgacagcaacaagcccttgagtttcctcaccaccctgcgcaccttgcgcaacgaccgcacactgattctgttcaccagcggcagcctgctgagcaccattgtccacgggcgctataccttgtatctgtcgcagtttttgctggtagcctacaaacccgccgaggcgctgaagattctgtctgcggtactggcctgcaatgccatcactgtgattttgatgcagtaccagatcggccgtttcctcaaacgtgagcaactgcgctattggatcgtgctaggtacgttgctgttcatgaccgggcttgtcggtttcagcctcgcagacagcctggtcacctggtgcatggcaatgttcgtgttcacactgggcgagatgatcatctacccctccgagttcctgtttatcgacaccatcgcacctgatgcactgcgcggcagttactacggtgcacagaacctggcggcattcggcggggcaatgagcccggtgatttgcggctatctgctgatcaatgccacgccggccagcatgttctatgcgttgggggcactgactgcggtagggggcaccttgtgtttcttgagtgggcgacgggtagcaggttcttgctgatatttacccaggatcccgctattaatagcgaaacctctcacggacccgagccccatgaaattcgatacggcctacagcctgagtctcgatgacaagctgtcgatctacgacgtacgagacctgaatttcgacgagaccgccgacttcgactccgacaaggaccgtttcctgtgccccaacgatgagtgccgggcagcgtttgatcccggcaataccctgagcaccttcaacgctaaaaacgtcaattacctgcgtacgccgcacttcaagaacaagaccggcacccggcatatcgacggctgccgctacgccagcacgcacaagagcgcagccggcgaaagcgacgacgagcgcgaggacaatttcccatcggaattagtgctcacccgccgtcagtacgagcgcaagaccccgctggcaggctccgaaggaaacatcccacaagagccaacaaagactccctcaaaccgcagctccatttcccacaacgccagcgacaccacaccggacaaaaccagcgtgttcgcccacccggtggaatgctacgtgtccaatatcgacgacaaggacaagctcaagtccatgccgttgaagatcggcgatcacaccgccacctactggacgttcttcaagaagatcgaatacctgcaggacaacaagggcctgatctactggggcaggatcaaagaaatcaaggactacaccagcagctttcgcatcgacttcgaaaagaaggtgtggctcgacaagaagccctactcggtcaatgtctacctgagcaagaaactcatcgagaactaccgcaagcgcaaggcgttcctggagcagatcaaggcggcggtggacagtgagcgggcgttgtactgcttcttctatggggtgacgccggaactgaaacaggtgccgagcaagaaaaaccccgagcagacgttcggggtgttcagcgcgaatatcgagaacctggatcacctgatcattcgggaggcgccgggggtggaatagtgcgcatcagcggcaggacgctttgtatgcccgatagatttcgcgtgtttgttgagccttggcgacacctacgcccccgaaggctaccaaccagtggatcagcatttcctcatcaggaaacacataggtgttttgccctttgaatcctctgggtgttcgattgattcctgcgtcgtagcgcaatggactccaaggctgcgttacaaaatcaaaatcctcggcatcccatttaaagaaccgcagtacttcattaagggtagtctggccactgcgatcgccacgttggacgaggcaataggcttgattagccaacatctgctccagcacctgaggatcgacccaatccagcactgcgcatttcaacgcattatctagaataccggccgtccaacgctcgaaaaacacctggaaaaatcgttcgctatcagcttttttcatatcgaaaaagagcatgcagtaacgggttttaagatgcataaccactaccacatgcttgcgtttaactgtcgcagcatgcaccagccactgatgggggtcgctgtgaagatcatagctctcgacaggcagagcaggccgtagaacgggtgtatgctttttgcctttgtgtactcggctgaaaaactcacaggcagcttgtgagcaattgaacgtcagcattgcagttgctccttcattttacttcccacgccagcaacgaaccgtccaggtttgtgatgaagggatatccacccattcaatgtcataaggttgtcgagcggcatacctaatcgcatccagcgcctctccagtgagaactgccaactcggaatccgtcggcaagtcacgcgtgaccatcacagccaggccactgagtcggttcttcaaatgcagcttttttgtacctgtcatcgccatcgtctggcaaatagactactgccagggcgcaggaaatcgaacaaggccatgtcataaaaaaccagttgatgagcggtcaaaacaactgtacaaaaacacagtatattttgtcctcccccgtcaaaccctggagataccccatgtcctctctggcaatgagctctttcgtagaacagcagatcgtcctgcatcaattcaccgccaagcacagcgtacaggcgcgcgcgatgctgggctggagccgggaacgcctggcacaccaggctggcgtggcggttgaagccgttcagcagtttgaatgtcaatgcgacgtggatgacgaaacccgcctggccctggcctttcggctggaagctgaaggcctggtgtttttcccggggtttgcgccggggtgggggatgagtacacgccgctttgacaccgccacaaccgaacacgcagcgcaagggatcatctctcgcttgatcggcgcaacttcgtcatcacttgactcacccactgctcaagccaatggtgcatagcggccagccgtaccaccttgctggccagcgcctggacggggtcccatgcactcccctctcaaccgcgaaacgtcaggcctgcagttgcaatgcctgacacgtcatttgcggcgtcagagcaccggcttgatttgagcacgggctgcctgctcatacccatgggccacggccagcaaggtgggttcggaccactgggtcccgaaaaaataggcactggttggtagcccattctcatccttacccgcagggacagcgatgcctgggtagccggctgctgctaccccaaaatagtcgttagtctcaaaatccgacaccatggcgtccagaccctccgatttgatcgggtcgtcaatggtagcgcgaaagtctcggatgagctcatcccaaaagggtttgctctgctcaggcgtcatggtttgggcattgatttggttgaggactgtctggtgatccacctccgcgccatcacgtttaatgttgaacagggtcagatcaggcagtgaatcgactggcaaccctgaacgcttgcccacataagtattcaattcattctttacgtccgagaacaacaaatctacccaacgcgaatcatcggccaggcgcatctcgaccggcactacttccgcgccttgctcacgaagcacggcaagtatccggcggaatgacgcactgtccttagtgggtgtgggttcgccagtttcagaaaacgttgcgggatagccgatacgcttgcctttcaacgcgcctggaaccagtaatttcgtgtaatcgataccttggggcgctccctggctcgccggatccttgggatcgctgcccgacatggcattgagcatcagcgccacatcaaataccgaacgcgccatcgggccaggagtgtcctggtggtgacttgcaggaataattccattacggtccagcaagccaacgctgggcttgagcccgacaaccccattgcgcgctgctggcacaataatcgaaccactggtttcagttcccaccgccaagggcgccaaccccgccgcaacggcgacggcagacccggaactggaacccccgacgtcggcatccgcaccatgtgggttacgggtttgtccccccctgctgctccagccatcaggaccaccacgaaaccctgccagttcggtcatattggttttaccgaggatcaccgcgccctgcttgatcaggtagtcgaccaatggggcgttcttgccgacaggtgcccccaccaggccaaaagcacctgcactggtttgcatgccttcagtttcgatggtgtccttgagcaaaacaggaatgccatgcaggaggccacgcacgttgccgctggctcgttcacggtccagttcgcgtgcggtttcaagtgccttggggttgagttcgatgatggacttcagtttcgggtcgaccctgcgaatccgctcatgcaggtacgtgaccaagtcggctgaaccgaacctgccttgggccatttgcgcgccaagctcattgacattgaggtattcggtccccggagggactgcctttgaaacaacaggtgagtggccgtctgcaaaagactgaacaaactgccggacgatggagcccattccatatgcgataccgatcataaaacctctcgaggagtaagaaatgacgaaggaccaacgttgatccgtgggccagtctaaaaactcttctcctgccggacagcgcgacgcgtgcggttcactgtgtgggatagttcaacgcaacgggtagccttccaaggggtccatcaaacgacgggagcttcgatactcgcacaccatggccaccaaccactccttcgcccatcgtgcgccgtagaaccaaagtgtcgcgccatcctcgagcggctcacccagccccgggtaaccactccagcaagccccatggaaggcggtactgcggctgtcggataccaaggcatccagtcgatactcatgcacaagctcatcgatttcattgcgaacatgcagggtgtcgatacggtgcgcatgcaccggtaccagtacggcgccggaccgaagcaggatgtccagcgctttcaggaaggaggtgcggtgctcaatcaactgatgttcatgcccctccacaaaccgctcggcaaatcccaggcgcctgccctgcaacgcactggcggcggtaaaggtcgtgttgttctgcaccaggggcacttccaccatcaccggccccgagggttcaataccactcaatgcgatcaatgacagcgacgggtcacgcgagggttttagagggagtcccggggcgtcataccccgggaccgggacgcttttccccaaggcgccatgagcttggggatcagcaccgaaagcgataccacgcgagcttgtatgctcttgggctatcgttgcctggccagacgaatcagtgagcgcagacacccgctgccctgtcggacaaggcaaccccgcctgccaatatttcttgcacgtgctctccataaaagacgtcccccgacacataaattttcggggatcatcgcaccgttgcctggcgcctgtcgcagctctgaaacagcttgaaaactcctttttccatagcctcctccgtcagcctgcgaggtgttcctgcgcaccctgggcttccacctccagccaccacgcaaccccacgctcaggctgattcaagctgaacgcctgccccatctgcggcgtagtgatggacacgttgcgctcccaggccagggccatgatgcggtcgaacggctcgtgccaggcatggaacgccaggtcgaaagtgccgttgtgaatcggcagcaaccagcggcccttgaggtcgatatgcgcttgcagggtttgctctggctgcatatgcacgtgaggccaatcgacgttgtaagcacctgtttccatcagcgtcagatcgaacggaccgtactgctcgccgatgcgtttaaaaccgtcgaagtaacctgtgtcaccgctgaagaaaattcgccgaggaccatcgatcatcacccaggaacaccacagggtctggttcgcatcaaataggccacgcccggaaaaatgttgcgcaggggtggcgacaaaccgaatgccatccacttcggtgccctgccaccaatccagttggcgtaccttgctggaatccacgccccacttgaccaggatgtcgcccacgcccagcggcgcaagaaaataacggaccttgtcggccaattggacgacagctttgcggtccaggtggtcgtagtggttgtgggaaagaatcaccgcctccaggggcggcaactcttcaaggctgatcggtggctgatggaagcgcttggggccggcccaactgaacggtgaggcgcgctcggcaaataccgggtcggttacccagaatttaccgcgcattttcagcaacacggtggaatgtccaaggcggaacacgctgtgatccggggccgccagcaattgctcgcgagtcagtggttgtaccgggatctgccccaccggccgcgtgctgcgtggtttgttgaacaacatgttccagaaaatgcgcaaggttttgccgaagccaccgtgctgcacgggggtgtcgttgctgaagtgcccttggccttgcttgggcgctgctggcgaagaatcgacgcgggacgagatcgtggccatttccgggtgactcctacggatcgcttataaattacactgcacagtgtagtttcaagattgcaacaaaatccggagcaagtaaactaccgagtgtaattttcctccaagagccgagcgccacccatgactgcacctcaacgcctcaccgaccgtaaacgcgaagccattgtggctgcggccatcgccgaatttcgcgcaaacggtttcgaggtcaccagcatggacaagatcgccgccaccgccggcgtatccaagcgcaccgtgtacaaccacttccccagcaaagaagaactgttcgctgaaattcttcatcaactctgggccagcagcgtcgcccaacttgacgtcagctacaccagcgaccgcccgttgcgcgaacaactgcgcgggctgctggaggcgaagatgaagatgatgtcggacgccaatttcctcgacctcgctcgcgtcgccatcgccgccaccatccattcgccggagcgtgcgcaagacatggtcacccgcctgagccagcgcgaagaaggcttcacccaatgggttcgcgccgcccaggctgacggccggctcaactgctcagaccccgccttcgccgcccaccagatccagagcctgctcaaggccttcgccttctggccacaaatcaccctcggccaacccactctggatgcagcccaccaggccagtgtgatcgagtcggccatcgacctgttcctcgccggctacgaagtcaccgccccccgccaaccgtaaaaaacctgttgtgtgagcgacattccaggtcgtttttgacgcattcgccctccgttttgcgcaaatggcctggaaggacactgattattcccacgcgaataactgacaatattcacagtcattatccgatcaacggttgatccagcgaacgcgcgccaccgtatctgtaaaaaacagctgcccccaggaatttatggaaaacagacaaggcaaagggctttcatttgccaagcgtatctacaaaccaaggatcatcggccttgccatcggttgcatcagtgtcagcggcgccctttaccccctcgccatgccaggctgggtgtgggcactcctgctgttcaacgggtttgcctgggcgcatgtggcgtatcaactgtcgacccgctcgcaatacccctaccaggccgaacaacgcaacctgctgtatgactcgctgctcggcggcttctgggccgctgccacgcagttcacgccactgacggcagtgaccatcctgtcgatgatgaccatgaataacgtggccgccggcggcaagcgcctgttcctgcgtggcctgtgcgcacaagggctcggaatcggcgtagccggggcgctgttcggtatccggttcaaccctgatgtcagcctgctgcaggtctacacctgcctgccgatgctgacgctctatcccatggccatcggcatggtctgctatcaactggcaatcaaactgtccgaacacaagcgcgccctgagcgccctgagccgcaccgacagcctcaccgggctgctcaatcacggttcctggaaggacctgctgcacctcaagttccacaagtgccagcaacagcaaagccacgccaccattgccttgatcgacatcgaccacttcaagcagatcaacgacacccacggccatattgtcggcgatgcggtactgcggcagttgagcctggagttgcggcgcaacctgcgggaaaacgacctggccggacgttacgggggcgatgagttctgtgtgattcttccgcaaatgccgctggaacaggccgcccggatcatggagcgcatgcgcgaaaccttcagcaattaccgcaacccgcagatccccgaattgcgggtcagcctgagcatcggcctggccgacttccaacccttctttagcgatgccgcgatgtggctgaatgcagcggatcgcgcgctgtacgccgccaaggacaccgggcgcaaccgggtcaatgtcagcgacaaagtgatcgcccattccgcctaaagtcgtcctacgactactcgtccgaatcttccagcctgccagccagaagaaagcataatgccaccactggtcgcctacccaaaaaaggtcctccctcaagggcgaacttcctgccaggctgaccactctgaacccgttgtcccaccccctctgtcagcacaaggaagctggcaatgagcaagtcaaccgtagggcatataccttacgggggcaggcgcatatccaaggaaactccagagtctgcttgcccgagcaccgcacatgctattcaacacgcataaaagaacgatcaacaccctgcaacacaccgtcgcccaacaggccagcctgctggacgctatcgagcgctccatggcggtgatcgaattcgacctgtccggcaatgtgctgcgggccaatgccaatttcctccagaccatgggttaccgcgccgagcaggtcgagggccagccccatcgaatgttctgtaccccgggctacacccgcagccctgagtacaaccagctgtggtcaaatctgcgcaatggccactcccagtcaggcacctttgaacgggtagccggcgatggtcagtcggtgtggctggaagccagctacaacccggtgcgtgatgacgcgggccaggtgaccaaagtggtgaagtacgcgatggatgtgaccccgcgcctgcaagccgaaagcgaagccaatgccaaactggacgccatcggtcgtgccatggcggtgatcgagttcaacctcgacggcaccatcatcaccgccaacgccaacttcctgcagcgcatgggttataccctggcgcagatccagggccagcatcaccgaatgttctgcagcgcggcgctggccagcagcccgacctacagcgacttctggaaacgcctgaaccagggagaactgttcagcggccagttcgagcgggtggataaaaacggccaggtcgtgtggctcgaagccaactacaacccggtgtacgacgccagcgggcggctgtgcaaagtggtgaagttcgccacggacatcaccgcccgtgtgcaacagcatgcggcggacgcgcagagtgcggcccaggcctatcacctgtccctgagcacccaggacatggcagagaaaggtgccgaggtgatccagaaaaccgccaatggcatgcgcgaaatttctgcggacatcgacgattcctcacaactgatcgccaagctcggtgatcgctcgcaacagatcactgccatcgttaacaccattcgcggtatcgccgaccagaccaacctgctggccctcaacgccgccatcgaggcagcacgtgcgggcgaacaaggccgtggtttcgccgtggtggccgacgaagtccggcaactggcggcacgcaccagcggctccaccacggagatttccagcatgatcgcgatgattcaggctgaaacccgacaagccatcgacagcatggacgccacccgcgaccgtgctgcccaaggggttgaaatggccaaccaggccggcacggtgatcctgcagattcgccaaggcaccagtgaagcggtgcaggcggtgagtgcgttcgccaacgagcggggcggcaactgacccgatcttcatacggagtgccgggggctcggtctatagtgctggttgttcttcaagcatgagatccgagcccgccatgaccccagaaaagcccgaagccacccccgtcgaccacctgcgcttccaccgcccccacgcccacctggcaccgaccttcggcaacgacacctttgccctcaaggccgaagccttcgcacgcttcttcggtacgccgaccttcctcggcgcacaaaccgccatcgtggtgttgtgggtggtactgaacatgaccggcatcacgcatttcgacgtgtacccgttcatcctgctcaacctggcgttcagcctgcaatcggcctacgccgcgcccctgatcctgctggcccagacccgccaggccgcccgcgacaaggcgcagtccgacgcggatgcgcagcaccgcgaagccctggcgattgccaacaccgagcgccaggcccaggcggcgcagaccaccaagcagttgctggaactgctggaacagaacacccggctcacggaaatgaccaaacaactgactgagcacattgaaagcctgacctgcgaaatgcatgagcactttgtgcgaaaaacctaaggcagtcgcacatgccgtcccagctcatcgaatagggtcaccaccgagcgcaacgctcggcagtccgggcgcgtgagcaaccacaacgcggtgtcatgccctgccaacgcagggcccagcgattgcaggccgtcgcccaatagaaagtccggcaaggccgccacgcccaaaccggcccgtaccagttcggtgaccgataacatgctgttgcagcgataactggggcgcacaccgggcagctgctcgcgacgccaggcgaccgtggggtggtcgggcaggaagtcatccggggcgacccaaggcaggtcggccaactcacggcccgcgtgctgacgggcaaaatccgcgctggcgcacacctgataagccacattgcccaggcgtcgacccaccagatgctccgggggcgtgcgggtcaggcgcagggcgatatccgcgtcacggcggctgaggttggcgaagtcattcgaggtactcagctccagggtcagtgccgggtagtgcggcatgaactgcgccagggccggcaacagcaaaccttgcaacaccgagtcggtacaggtcaggcgcaccgtaccgctgatcacctcaccgccctgctccacaccaatgcgcgctgcttccagggcctgttcggcacgctcggcctgttgcgccaggttgctcgccaggctggtgggcaggtagccggcacggcttttttcaaacaacgtctggcccagcgccgcctccaggcgtcgcaccgcgcggaacaccgtagacacatccacccgcaataacgccgccgcccgtgcgagcgtgccgccacgcaccagggcgaggatcagcgataaatcagggtaatccagtgaatagtgcgtagctgcattgagcatgtgggtaaacgccaatattgattgcgcgaacgccaatctatagtgcgccccaggacaccacaagccatgggatgtacaggatgaaaaccacaccgctgcacctcgccctgatcggcgattacaaccccgctgtcatcgcccaccaagccatccccgtggccgtgcaacaggccgccgaaatcctggggctgagcgtccatgtccagtggctcgacaccgctgccctgccccagtcactccacgctttcgatggtttctggtgcgtccccgccagcccctaccgcgacaccgatggcgcactgcgggcgatccgttttgcccgcgagcaacgccgacctttcctcggcacctgcggcggttttcagcacgcggtgctggaatatgcgcgcaacgtgctgggctggaaggatgccgagcacggcgaactcgcgccgcacgccaagcgcgccgtgatcgcgccactgagctgtgcgctggtggaagccaccgacaccgtgcgcctggtgccgtacacgcgcatcgccgaggcctacgacacccttgatctgcaggagggctatcgttgccgctacggtgtgaaccccgagtttctcgatgccctgctggaaggcaacctgatccccagcggccatgactcggcaggcgatctgcgggccgtggaattgctcgaccacccgttcttcgtcgccacgctgttccaacccgaacgcgctgcgctaaagggtattacgccgcccttggcaattgccttgctcaaggcttgccaggcagtgtcggcatgatcgcccgcacacccgccccgccctactacgcggtgattttcagttcactgcgcaccgagggcgaccagggttacagccaggccgccaaccgcatgctcgaactggcgcgcggacaaccgggatttctcggcgtggaatcagcacgggaagacgggttgggcattaccgtgtcgtattgggacagtgaggcggcgatcctggcctggaagcagcaggccgagcaccgggcggtacgcgaacaggggcgcaccacttggtactcggcgttccagacacgggtgtgcaaagtcgaacgggcgtacgccttcgaaagcggttgagcctttgggttgagagtgcctgatgatgaactggcttgcaggtgatgagcagggttgtttgtggttaacaggcttgttgtggcgagcaggcttgtttgtggcgagcaggcctgctcgccacagggttagctcaccaggctgcgcaacgcactgatctgcggaatctccacccgccgcatatacacccgcaacggctcggtgatgttgatacggtcgtcgatgttctggtccagcagcaactggatgcgctcgcgggacagggtcatggtctgttccggggccggcagccagacgaattcggcagtgggaatgatgccgtcatcggccacgtccatgccgaaggagtcttcgctgaaacgcacgatgtactggccggtcttgcggttgaggccaacaaacccgtggagttggtcggcggcctggcagataagctcggaggtgatgcgcatggtaaacctcactgaaaagtcccacagggactggaaagatggtttacacgcgtggcacaaagtaccgccctctaacggagcagcttcgggcaagagtactgcaatgcctgcaaaaaaaactcagaaaattgaggcgtgagcacgttaatgtcggtttggtgatagcgcctttcgcaatcaattgttaaaaaggaggccttctcaaagctacctccacgaaaggacttcgcatatgcctgtcacgtttaccaagagtgccttgctgctcgccctgatgctcggccttggccaggcacaggctgccgacccgatcagcccggctgaattggcaaccaacgaaggcattccgtaccccgccgtgatcgcccaccgtggcgcttcctacgacgctcccgaatccaccgccgcggcctacaaaattgcccgcgacctgggtgccgactacctggaaatggacctgcagcgcagcaaggacggcgtgctgttcgccctgcacgacaacaacctgcagcgcaccaccgacgtggctaccaagttccccgaccgcaaggacgccccggccaacgagttcacctggaaagagctgcaaaccctcgacgccggcagctggttcaacgccgcctacccggatcgcgcgcgtccaggtttcgttggcctgaaaatccagagcctggacgacatcatcaagatcgccgaaggcaacccgcagcacaaacccggcctgtacatcgaaaccaaggagcccaagcaattcccgggcatcgaagccgacctgaaaaacaagctgctggacaaaggctggctgagctccgccggttccaaactgggcaagagcaacaccggtgtcggccagggcaagggccgcgtcgtgctgcaaactttcgaggttgccagcctcaaagagctgcagaaagaaatgcccaacaccccgaagatcctgctgttgtgggtgggtgaaggcagcatcgagccgaaaaacaagcagacgttcgctgagtccggcgaaaccaccaaggccgcctactacgccaagcaggaaccgaaggatgccgccgagttcgaaaaatgggtcgacgaagccaagagcctcggcgccatcggcaccggcccatcggctgagctgaccaaccacggcgaccagagctattcggacctggtcaaaccggaaatgaacaaactgacccacgacaagggcctgctggtgcacgtctacaccgtcgatgagccggtggacttcgacaaagtgatgaaggccggcgtcgatggcatcttcaccaaccgcgccgccgaactgctgaagttctacaagcgctggccgtcgtccagcgtgcaggatctgctgaacgactataagtactgagtggtcagtgtgccattaaggatgagttaagttgcgccggttaatctggcgccacttaaacagctcaccgaagaaggacacacaccatgaaaaccttgaccgctctgttcgccgctaccgccctgaccctgaccgccggcctggcccaggcggatgttcgcccggaccacattgaaggcctgctcaagtccggcgccgtgatgcctttcgaaaaactcaacgcggctgccctggccaaacatgcaggcgccaccatcaatgacaccgagctggaccacaacaacagtggtgtgctggtctacgaagtcgaactgaccgacaccgctggcaagaagtttgaagtgaagctcgacgccaagactggcgccgtgctggaagacaagctcgatacttgatttgaactaaaaaaaagccacccttgggtggcttttttttgcctgatcaggcgctaagacgcgccgtcacctcattcaactcactcgacaacccacgcaggtcatggctcgccgcttcggtgcgcttcacgttgtcgaggttggccgtcgccaccgtggtgatctgcgtgatgttgcgcgagatgtcctcggccaccgaagtctgctcctccgcggccgtggcaatctgacggttcatgtcgcgaatcgcctccaccgcctgagtgatgtgagccagcatggcgccggcttgcgtgaccttctccacactctcatcgctgcacgactggccgctcacaatcgcttcagccgcgtccaccgcaccggtctgcaccgcctcgataatcccgttgatctcgatgatcgacgccgccgtgcgttgcgccaggctgcgcacctcatcagccaccaccgcaaagccccgtcctgcttcgcctgcgcgcgcggcctcaatcgccgcgttgagcgccagcaaattggtctgctcggcgatgccgcgaatcacttccagcactttgccgatgcgtacgctgtcggtttccaggcggcggatgatcgtgccggtgttgaggatttcgttgcgcatctggccgatggtggcgatggtgactctcatcacctcaccgccttcgcgggccgaatggtccgcctcgtcggccgcacgggaagcactggcggcatgacgcgcgacttcctgggcggtggcggacatttcggtcatggccgtggccacttggtcggtgcggttgaattgatcgtgggtgcccgtggccatctgcccggcgatggcgttcaactcgccgctggcgccgaccaggtcgctggcgctgcgctgcaagcggctgaaggtttcggcaagaaagtcgcgcaaggtatttgcggcggcggccaagtgacccaactcatcctggcgacggctggctacgcgctcggcgaaccgaccgtggctcagttgcgtcacgtagtcgatcaggctgcggatcggcaggatcaggttgcggttgatcaaccacaggctgaacaagccgatcagcacaccggacagcaacatgatcgccaaccccaccagcacggtgcgctcagcgtaggcgctgatggccttggattgctggctgccttgttcgcgcaggtcactgaccagcgcactcatttgctcgctggccgcgcggtccacgcccttcaccgccatatcgcccgcagtggcatcgccccccgccgccacgtaggcatcgcggcctttctggtaagccacaccgagttgctcgtgcgtctgacgcagggtttcgatgcgtcggctcaggctcgggtcgctgccggtctgggtgaccagccgagtgagaatgccctgcacatcgcgctgacgctcctggaactggccccagtatttctccatgtcctgaggctgcttgccgcgcaacaggacgtttttccattcctgcacctgcaccttgaattgcaggttggcctcgtcgatcaactgtgaggtcagcaacggcccatcgatcaaacttcgatagctcagcaccccattggacaggaagttgaaacaggccagggcgatcaacagcatcgccaacaggctgccaccgagcagcgacaggatttgtgctctcaaggaggttcgcaaaacattcatcggggaaaagcctcgatacaaggaagtggtgcatacacacggcgacttccctgtcatcaaaagcaccgccgatccacagcggttcttaacaccttgaatcggccgggccagaggcctcttgaacaactcctgacaggcggtcaaataaatgtcaccgcaacgaaataaatccaaaaccgtcacaaaactgtcaaattcccttgcaatgattcgcgcatgcgaacctgtgaaatctcctacaggcgcttttcctgcgagccctcatgaaccacagcatcgaccacagccaccaggactccgacctgttcggcttgctttacggtttccgttttcgccccggtgaaaagggcgagcagatcgattcggccacggccctccaggccttgcgccaaccggccgacccggacgagtttttgtggttgcacctgaacctggctcacgccgcgtgcgagcgctggatgcaggcgcatctggacctgccggaagagttcttcgaagccctgcatgaaggctcgcgctccacgcgcatcgagcatgtcgactcggccctgctggcggtggtcaacgacgtggtcttcaacttcagcagcatggtctcgtcggatatttccacgctatgggtgtgtgcgcgcagtcgcctgctgatcagcgcgcgcctgcaaccgctgcactcggtggacaagctgcgctcatcggtgaaggccggtgaaagctttcgctcgccactggccttgctcgtgcacctgctgcgtgaccagggtgaagtgctgacgcagatcgtgcgcaagaccagcatcagcgtcgaccatatcgaggatcaattactctcttcgcgcctgtccaccaaccgcgccgaactgggcgcggcgcgccgggtgctggtgcgcttgcaacgcctgctggcactggaaccgggctcgctgctacgcctgctcaaccgcccgccgcaatggctgcaaaaggaagacgtgaaggagttgcgcaaatccaccgaagagtttgcgctgatcatcaacgacctgatggccctgggcgaacgcatcaagctgttgcaggaagagatcgccgccaacctcaacgagcaaagcaaccgcacgctgtttaccctcaccgtggtgacggtgctggcgttgccgatcaacatcatcgccggttttttcggcatgaacgtgggcggtgtgccactttcccaagacccggaaggcttctggatattggtggcgttggtggcgacctttaccttgatcgccgggcggtgggccttcaggaagcgcaaagactactgagctgcaacaccgttgaacatgtgggagggggcttgcccccgatggcagtgggtcagctacagattagcttgctgacccaccgtcatcggggggcaagccccctcccacataggttctgcagcgtatacaggatcagcggctatcccaattccatcaaacactgacctatggcagcatctctgtaacattctgcaatgactatgaacgacatcctccccacactggatgccccggcatggccaccccttccctgactgcctccacccacgcctcacccgctgcccccaaacccaggctggacaagaaacccagcctggtgacggtgatcatcttctttgccgtgctcgccatgggcctgttgttcaccgcctacagcctgatgcacgacatgcacgaaatgggcgcccagctcaccacctggacgccatttttgctgctgggcgtggcgctgttgatcgccctgggtttcgagttcgtcaacggcttccacgacacagccaacgccgtggcgacggtgatctacaccaactcgctgccgccgcattttgcggtggtgtggtcgggctttttcaactttcttggcgtgctgctctccagcggcgcggtggcgttcggcatcattgcgttgctaccggtcgagttgattttgcaggtgggttcgtcggccggtttcgcgatgatcttcgccctgctgatcgccgcgatcctgtggaaccttggcacctggtggctgggcttgccggcgtcgtcgtcccacacgctgatcggttcgatcatcggcgtgggcgtggcgaatgccttgatgcacgggcgtgacggcaccagcggtgtggactggagccaggcgatcaagattggctacgccttgctgctgtcgccgctgatcggctttgcctttgcggcgatgctgttgctggccctgcgcgccttcgtcaagaaccgcgcgctgtacaaggcgccaaaaggcgataccccgccgccgtggtggatccgcggcatgctgatcgccacctgcaccggcgtgtcctttgcccacggctccaacgatgggcaaaaaggcatgggcctgatcatgctgatcctggtgggcaccttgccgatggcctacgcactgaaccgcaccatgccggctgagcagtcattgcagttcgccgccgtagccgaagtcacccaagtcgccctggtgaaaagtgcaccgcaagcattgaccggtgacccacgaccgatcctctccacttacgtgcgcaccaaggaagccaccccgcaactcgtccccgccctcgcagccctggccgggcagatcggtgatgaggtgaaaggctacggttccctggccaaagtgcctgccgaagccgtcggcaacgtgcgcaacgacatgtacctgaccagcgaaaccattcgcctgatggacaagggcaaggtcggcaacttcgacgccgacacccaaggcaagctgcaactgttcaagcaacagatcgacaattccacgcgcttcattccgctgtgggtgaagatcgccgtggccatcgcactcggcctgggcaccatggtcggctggaagcgcatcgtggtgaccgtgggcgagaagatcggcaagacccacctgacctacgcccagggcgcctcggcggaaatggtagcgatgctgaccatcggcgcggccgatatgtatgggttgccggtgtcgaccacccatgtgttgtcgtcgggtgtggcggggaccatggtggcaaacgggggcgggttgcagatgcgcacgatccgcaatctggcgatggcgtgggtgctgacgttgccggcggccatcgtgctttcaggtagcttgtactggctgttcacccaactcttctgacacaacagtgattgaacatgtgggagggggcttgcccccgattgcagtgggtcagctatagataagctggctggtccaccgctatcgggggcaagccccctcccacagttttatcctgcgaacagcccggacatcagcttcaaccgcttcttgtacacccgccgcgcctccaacgcctcttccagcgtcactgccacaaaccccgcccgctggttcggttgcatctgcccgatcaaatccaggtcggcactgatcaccgtgccgatcatcgcgtagccaccacccgacaccgcgtcccggtgcaacacaatcggctccaacccggccggcacctggatcgaaccaatcgggtagcaactgtcgacgatgttcgacggatccgaccccgcgccaaacggctgctcccgtggctggaagctcaacgcactgccgcccttgaagcgatagccgatgcggtcggcttcggaacccacggtccagggctcggcgaaaaagctgctttttgccacgtccgtcaggcgctcgtaatacagccccggcaccacgcgcagggtgacatccccgcccaccgaacggcgcaacgccatcggcaaactgttgcccgcacgccccgtgccactggcttcaccgatgggcaactcgtcgccttcctgcaagcgccgaccgtgaaagccgcccagcgcgccgagggtgtaggtggcgcggctaccgagcaccagcggcacatcgatgccaccggccaccgcgaggtaagtccgcgcccccgccttgggaaactcaaagcgcaacacctgcccggcacgcacctgaaacgccgtgtcttggtgcaccacttcaccgtccaggcgcggcgacatcaaggcaccactgagggccaccagcgcatcctgttggaattccagttcggggccgatcagcgtgcactccaggcccgctgcgcccaccgggttgcccaccagatggttggccgcgctcagcgcgtattgatccagcgcgcccgacggcgggatacccaggtggtagtaaccttcgcggccaaggtcctgcacggaggtggcgaggccgggtttgaggaccttgatcatgccagcgcctcctgcagggttttcggatagccaatggggtcggcgagaaaagcgtcgagggagaattccaccgggcggatgcgcaggtcgaaacgtcctgcgtccacctcggccaccgcctgatcgtaggcgtcgcggtccatgggtttgaactgcacgatatcgccggggcggaagaacaccatgtgctccttgaggtaggccaactgctgcgccgggtcatagatcggcgccggggtcacgccgaacatctggtaaccgccggcaccgcgcaccgagtaaatgcaaccaaagcagccgccatggccgagggtgagtttcggcgtatcggtgcgtgggcgcaggtacttgggcacttgcaattggcgctcgcgctcgaccatctggaacatgaacggcaagcccgcgacaaacccgaccatcgacacaaaccacggcgcaccactgtgggctgcgataaacgcgtcgacatcagccaggccattgatgcgtgcggcgtactccaggtcggtgccgctggggtcctggtggcggtcgcgaaagcgcatcagcgtttcgtgcgtccacgggtcgttgtacagcaccgggatttcgatgatgcgcgtgtgcagggtgcgttcggccacggcctgggcttcggcggtctgcaccgcatcgagcaatacgtgaggggcaatgcggtcggggtcaaagcgaatctggaacgatgcattggccaggcacacatccagcacgccttccagcgccaggcgttccacggcgcgggtcaccgccatgcctttgaaaaaggcctccagggacatgctgtcgctgacctcggcaaacaggtgttcatcaccgccaaatctgtagcggatgggggacgtttcagccatgtctgttcctcttggaatcgttgtagaaaggcaggcgaaaaataaggcgatgatttcttattgtggtgttttgaccgtgatgcccgcttggtccagcgcttcgcgggtggcttccaccagttccagggcacccggcgtgtcgctgtgcaggcagatggaatcgaattcgataaacaggtcttcaccttccacggtgcgcacaagccccgtctgacaggcccgcaggacgcgtgccgccactgttgcaggatccagcgcccgcacattgcgggtaaacacgatggagccggtcagatcgtactcacggtcggcatagaactcccgcacaaccggctgccccagttccgtggccgcacgccagatcaccgaattgggcatgcagtacagcagcaaggtcggctcgatgatttgcaggttctgcaccagcagccgcgcagcttcttcgtcgcgggccaggtgcatatacagcgcgccgtggggcttgatgtgttgcagggtcacgccctgggcgcgggcgatttcccgcagggcgccgagttggtagagcatgtcgtccaccagctcttgagccggggcgttgatgtggcgacggccaaagccgaccaggtcgcggaagcccggatgcgcgccgatggccacgcccaattgtttggcccgctcgacggtgcgacgcatggtgccggggtcgccggcgtggaagccggtggcgatgttggccgagctgatataggccatcagttccgcgtcgacgccatcgccgatggtccaggggccaaagccttcgcccatgtccgagttgaaatccactgcctgcatcgaagtcgctccgcctaagtgatagaggaaaagtaggctgcggcttgaccccttgggaagatctattatcagatgacccatcttctgaaaatcagatagccctatgttatggagaggccgatgtccctgaccttgcgccaaattcgttatttcgtcgccaccgccgagatcggccagatttcccaggcggccatccacctgaacatatcccaatcggcggtgactacggcgatcaaggagctggagggcatgctcggcgtgcagttattcgtgcgctcggcccagggcatgaacctcacggatgccgggcggcattttctcaaccgtgcctacgtgatcctgcgcagtgtcgatgacgcgctgaacagcccgctgcccgactaccgcgccagtggcgtgctgcgcctggccgccagctacacggtactcggctacttcctgccgcaccatttgcagcgcatggagcactggcacccggacgtgaccatcgaggtcttcgagcaggagcgccaggccatcgaacagggcttgctcgatggccagttcgacatggcggtggtgctcaccgccaacctcactcacccggccatcgtttcggaaatcctcttcaattcggaacgccgcctgtggctgcccagccaccacccgctgtgcgaacgcggcgccgtgagcctggccgacgtggcccgcgaaccctacatcctgctcaccgtcgacgaggccgaacacagcgccatgcgctattgggaacaggccgggcaaacgcccctggtgcggctgcgcaccagttcggtggaagcggtgcgcagcatggtcgccaatggcagcggcgtggcgatcctgtccgacctggtgcatcgaccctggtccctggaaggcaagcgtatcgaaaccctcaccgtcaccgaccccgtcacgccgatgagtgtgggcctggcctggcaccgcgagcgcgccttcaccccggcgatgcaggcggtgcgcaattacttccacgacgcgttcctggcgccgcagcaactctcggcacggcgttagaggtgggcttgcagggtggcggccaaccagtccatgaacacccgcacccgcaacggcaaatgccgctggccggcgtacagcagtgacacgtccagcggcggcgccgggtagtccggcagcagcgcgaccagctcaccgctggccaataaatcaccgatacccagggccggcacctgggtaatcccgaacccccccaggcatgccgccttgtaggcatcggtgctgttgaccgtcacgcgcccggccatgggaacgcggtgcaccttgttgcccagcaggtattcaaagccagccgaacgcgcgcccagcggccgcacgtaatgcaccaactggtgccgcgccaggtcggccaatgtctcgggcatgccatggcgttgcaggtacgccgcgctcgcgcagttgatcatcggcatgctgcacagcaggcgcgccaccacgctttggtccggttgcgcaccgacgcgcagcacgcaatcaaagccttcggcgagcaggtcgacctggcggtcggtggtgctgatctccagctcgatcagggggtgagcatgcatgaattcgggcaggcgcggcaggatcaattcccgcgccatcacgttgggcatgtccacccgaatgcgcccgctcagttgcgcttcatcctggcgaaacaagccttccaactcttccatgtgcgacaacaggtccttgctgcgctcatacaaaacccggccgtcctgggtcgcctgcaccttgcgtgtggtgcgttgtaacaggcgcgtgccgagcagctcttccaaggcttgcacatgctcggacacagtcgagcgcggcaggccaaggctgtcgccggcctgggtaaaactcgacagttcggtgacacgcacgaaggtgcgcagcagctcaagtttgttcatttgattgttcgcctaatccgaccagttattccggtataacgctgtttatcacgttatgggcgaataaatacactgggttccactgatcacccacgaggactagaccatgacccgtaaaatcgcactcatcaccggcgccagccgtggcctgggcaaaagcgccgcgctgcacctggcggcacagggcgttgacatcatcggcacctaccacagcgcggcggctgaagcccaagcggtggtcgcacaggtccaggccctggggggccgcgccgccatgctgcaactggatgtgagccagagcggcacctttgatgattttgtcggcgaagtcggcaccgtgctcaaagacgtattcgcacaggaccacttcaattttctgatcaacaacgccggcatcggtgcccacgccagctttgccgagaccaccgaagcgcagttcgaccaattggtggcgatccaattcaaaggcccgtttttcctaacccagaagctgttgccactgatcaacgacggtggtcgtatcctcaatatctccagcggcctggcgcgtttcagcctgccgggctatgcggcgtatgcgtcgatgaaaggtgcgatggaagtgctgacccgctatcaggccaaggaattgggcggtcgtgggatcaccgtgaacatcctcgcgcccggcgccatcgaaactgatttcggcggcggcgccgtgcgcgacaatgcggcgctcaatacgatggtcgccaacaacaccgctctaggccgggcaggcttaccggacgatatcggcggcgccatcgccgtcctgctggccgacggtagcaactggatcacggggcagcgcatcgaggcgtcgggcggcatgtttctgtaaaaacgtgtcgcgcagtacgtcatagccccagtgatagacataggtgtacggcaggaaaaacagcagtacaccgatgtcgagcatgaacgcctgcatcaggctgatgttcagccacgccgcgatcaacggcacggcgacgatgatcagcccgccttcgaacatcagcgcatgcagcacccgcgtccaaccaccgttggacagttgcaggcgcaccttgagacggtcgaacaggctgttgaagatgatgttccaggtcagcgccagcaggctcaggcccagggtcaccgcacccatttccagggccggtctgccagtgatccataccagcagcggcgtacagatcaacagcgccaggccttcaaaacccagggcttggcatacacgttcagtaatcgacttggtagggctcataacctgtgctctgtgaaggacgatggttgccatgattaccctttgaatcgatacttcataactaataaccatcgatcaaggcgatagtcatggcctcccacgaagtgctgcaagcgtttgtccaggccgccacccaagggtcgttttcggcggcggcacgcaagctgggcaagagccagtccaccgtcagcgcggccgtggcgagcctggaaattgacctggatgtgctgctattcgaccgcagcagccgcaagccgacgctgactccggccggccatgtgctgctgcaacgcgccgagcaggtgctggaggccagcagccgtttggaattggcagcgagccagttatcccaggggttggagccgaaactgaccatcgccatgtcggatacctaccaatccgatcgtttcgagatcgccctcaaagcctttgagcagcgctacccggaccttgaactggaatgcctgatcgccgaatgtgaagacttgatcgcccttgtgcaaagtgggcgtgcgcatatcgcatttatcgaaaagcaggaggtctacccacccgacctgacgggcgctccggtggaagaacgcacggaaatcgcgctgttcgtcgcgccgacacacccactggcacacctgcgcaacatctcgaccgacacgctgcaacaacaccgcgaattgcgcctggccagcattatcaacccgactgaaacccgcccaaccggccgggtatggtcggcacccagttatttgatgctgatggaaatggcgcaactgggcttcggctgggcgccgatcccgcgctggctggtggagcgttttggcggcgaccatctggtcgaactcaaagcccgcagttggccacgctcggtggccgtggatgcgctgtggtcacggcaccacccgccagggccggcggggagttggttgctcggcaagatgctcgagtaactctccaccaggaccagctctttcaaagtctttgaagagccagccatatctggctaataccattccattaaaggcgaacactgcaactgtggcgagcgggcttgtcccgcgttgggnnnnnnnnnnnnnnnnnnnnnnnnnnnnnnnnnnnnnnnnnnnnnnnnnnnnnnnnnnnnnnnnnnnnnnnnnnnncccaacgcgggacaagcccgctcgccacagggtgttaatcgccagttctacctaaagaccttgaaagggctgaccttaaggacgccatcgtcggcaagccgggctcctacaaagtcaggcggcctgaacctgcggcgggcggttgttctggaagtattcgtgcagggcactcaatgcgggcagcgccaatgtttgcgcggcgacgcgtcagcagccttgattcagagttcgaccagacgcttttcgataaacctgcgttcgggcgcctgctgggtcaaggccagcgcccgctcgtaggctgcgcgtgcctctgcgacgcgccccagttgccggcagaattccccccgcgccgaatgcgccaagtggtaatccagcaactcgccacgcgccagaatcccctccacctgctgcaagccctccaacggtccatcgcgcatggccagcgctacggcgcggttcagttcgatcaccggtgacggcgttgccctgagcaatacatcgtagagaccgacgatctgcggccagtccgtctcatcggcacgcgtcgcttcggcatgcaccgctgcgatggcggcctgcaggcaatacgggccaaagcgccgggtgcccagtgcgcgctccaccaacccacagccttcggcaatcaacgacgcgtcccacagcgagcgatcctgttcatccagcagcaccaactcaccctcggccgaggtgcgcgccgggcggcgggactcgtgcaacagcatcaacgccagcaaacccatgacctccggctcgggcagcaactccagcagcaggcgccccaggcgaatcgcttcgcgggtcaactcctcgcgggtcaggtcggccccgacggacgccgaatacccttcgttgaacaccaggtaaatcacccgcagcaccgcgtccaaacgctccggcagcgcgtccctggacggcacctgataagggattttcgcctcacggatcttgcccttggcgcgcacgatgcgctgggcgatggtggccggcgtggccaggaacgcccgggcgatttcctcggtggtgaggtcgcagatctcacgcaaggtcagcgccgcctgggcatccgccgccagcgccgggtggcagcaggtgaagatcaggcgcaggcggtcgtcttccacgtcttcatcgctccagtcagccgcttccagcgtgtcggcctgctcctgcaacaacggggtaaaacgcgcctgacggcgcagacggtcgatggccttgaagcgcccggtcgacaccagccaggcccgtggattggccggcacaccgtccagcggccagcgctgcacggcgacgaaaaacgcctcgtgcagggcttcctcggccaggtcgaagtcgcccagcaagcgaatcaacgtggcgagcacccgacgtgattcgctgcggtaaagggcatcgaccgagagggtcaatcgtgcataccctcggtcaccagcgtgaccagccgatccaggctctggccccagccatcgtgaaagcccatggcttcgtgggcctgtttgtcttcggcgctccagtgcatggcccgggcggtgtagagcgtcttgccatcgacctcgtcaaaggtgacttcagcagtcatgaacggcttgcccgagggtatccagcccggcatgaaggcatcggtaaacaccaggcgactgggcgcaacgatttccaggaacacgccctgggtcgggtattcggcaccgtccggcgcacgcatcagggtacgaaacaggccaccgacccacaggttcatttcgcactcgggggtggtcatgccgtgggggccccaccattgctggagcaaggcgggttcggtccaggcgcggaacacccggctgcgcggtgcatcgatcaggcggctgatggacagttcaaactcggcaggttgcgtagacatggggtaaacctcttgagtcttatggttgttgtgttcagagattcaattcacgcacggggcgcacttccacactgccgacccgggccgccggaataccaccggccacctggatcgcttcgttcaagtcgcgggcctcgatcaggtagaacccggcgagctgctccttggtttcggcaaacggcccgtcggtgatcgacagcttgccattgcgcatgcgcacggtggtggcagtgctcaccgactccaacggctcggcagccagcatgcgaccgctggcctgtacggactgcgcgtaggcgaagcattccgggtctgccgggctgtccggcgaggtgtgcaatacctgttcgttgctgtagatcaggcagaggtatttcatggatttctccgttttcggactactgactatagttcgcggcgctcacggtttcaggtcgaacagaccggtgccggtttccatgtcaaaaggcgcggaccagtgctcatgcaccaccttccactgcccgttgatgcgctggtaaccggcgctgacccgcatccagcatgtcttgagcacgccatccggcccggcgccaccacagtgggcgagccagtgggcaaaggcgctgtcttctccggcaacgatatgcagctcatgaaagtcgaaaataccggggccggggcaaaactccatgcaggccttccagtgcgcctggtaggcagccttgcctttgaattgcagggcgccaacggcgtcgaacgcgacgatatcatcggcgtaaaagctgacaatcttgtcgacatccttggccgtgacggcgtatttccattgttcgatcagggtgttgattgcagtgctcatggcgatactcctcggggtcgaaaactcacggaagacacccctagtcgaatggcccttcggcaaatcgacaacccgcttaaaaataatttcgccctcggcaaacccgctagaatccacgcctctttgtaggatttcggatgcaccaccgatggaaacccgcctcgttgcctatgagacgctgagccttgcgcagaaacagcaactcgacaccctgcaagtgcatcccgagcaactgccgtattccggcgatatctactgtgcgctgaacagcctgctggtcaaccccagccccggcgccatcaagggcttcgccctcctcgccgacgaaataccggtggccttcctgctgctcaaacgcccaccatgcctgccccattgggccgatgaacatagcgcgaccttgcatgcgttgcaggtggaccggcatcaacaagggcgcgggttcggcaaggcgtgcttgcaggcgctgccggcggcggcactggctgcgtggccgcagatcaagggcctggagttgtcggtggacgcggacaatgtggcggcgatggggttgtatctgagggctgggtggctggacagcggggaggcgtataaggggcggattgggtatgagcggaggttgaggtgggtgtttggtcaggccaaccttgacacgctcaaaatgtaacgtatacataacttaacaaaagctaagtaataaatacgtgacatggatacttctgtaatcactcatcgactcggcatccaactacgttccctgcgcctcaaccgtggctataagcaggccgatttggcgaaactggccggagttacccgacaaaaactgatcgaaatcgagaaaggcagcctctcggtctcgatgaatgcctatgcccgggtgactgcagcactgggcagcgaattcaaattagtgcctgtgaccctgccgacccttgaggaagtggaggatctatttaatgactaatcccaggttgcgtgttcacacacctcaaggtgatagcggcagcgtattgatgggtgccgatgactatctgtttcgctacggcgataacacgcaagcgcatagcgcagtcagcctgttgatgccggttcgcacagaagaatatcgccgccgagaactccaccccatcttccagatgaacctgccggaaggctacgtcctggagcaactgcgcaatcggctcgccaaaacggtcagagtcgacccgatgttgctgttggcactctcgggcagtagcgcgccgatcggccgggttttcgtgtcttcggatcaagtaaatgagctgatccatcgcaacagctctccggcaaccggagaaagtcttgacgaaattctcgcctgggatggcgcagaagacctgttcgtcgaactggtggatcgctacatcctgcgagcaggcatttctggcgtgcagcccaaggtgctggtgccggaaaagccgctgacacccgaacagaaattcacctcgaaaaccaacgacctgattatcaagagcgggcgcgacgagtttccggggttggccatcaatgaatacctgtgcatgtccattgcccgcgatgcaggtctgcccgtgccgccgttttacctgtcacaaaaccataagctgttcatcatgcggcgctttgatcgggacgaacacctcaacccactgggttttgaggacatgactacactgatgggcctgtccgccgaacaaaagtacaccaagagttacgccgccatcgccaaggccgtacgtgtgttctgtgccccggcctatcaacgcagctcactcgatcaattgtttgatagcgtggcgctgagctgcatcgtggctaacggcgatgcgcacctgaaaaacttcggcgtgctctatagcgaccccgtgcaatcggatacacgtttggcgcctgcttacgacatcgtcaacaccactgcttacattcctgaagacacattggcgctggacctgagtggaaacaaatcgctgttcgcctcacgcctgggcatcctcgaatttgccagaacctgcgaaatagaaaatcccgaaatgcgcatccaggcgctcctgcagacgcttgaagtcgtgctcaagcgcgaagacgattactgtcgattagcgcctgaggtcgcgaaagccattcggcgatccgctcagggttaccaacacagctttggcggctgaacacgcgcccgtattcatccaaggacaaggtgactctcatgctgacaactctcgaacaactcgaaaccctctacggcctcccccacgagcgcgccgtacgcaaggaaatcccgtttctcaatgaggactaccaggcgatggtgcgggcttcaccgctggtggtggtgagttcgtccgggccggacggcatcgacggttcgccacgcggggatgtgccggggttcgtgcggatcgtggatgagcgcaccctggcgattccggatcggccgggaaacaaccgcctggataccttgcgcaacctggtgcaggacccgcgcattgcgttgctgttcatcatccccgggatcggtgagacgttgcgggtgaatgggcgggcgcagatttgcattgagccgcaactgctggagagttttgcggtgaatggcaagccggcgcgctcggtgattctggtgcaggtggaagccgcgtatttccactgctccaaggcgtttgtccgctcggactgctggaacccggagaaacacctggaccgttcggcgctgccctcggcgggagcgtttcacaagcggctcaatgatgggcagtttgacgccgaggcgtatgaccgggagatgccggagcgggtcagaaccacgctgtactgatacctctgtatgagccggcttgccggctcatacacgggcaatcagcctctttctcccaccggcaaccagatctccaccgtcccggtgcccttgcgcccgtcaaaatccgcgctgtagcgctcgaaatccgcgcccatcaccttgtagcccgagtgcggcagccactcgaacatgatgcgttcgtaggtttgctccagcgcctgcaccggcccgtaatgcgggaacacggcatagttgagtggcggaatttccacgcattcaaagttgctcggcacgtcacccttggtggggacttcgaccccggccatgtagtcgaattcgccatggttggggttatggcaaacgccataggtcacaccgccgacgcgcttcttgatgtccttgatgcaggtgtcgaacaactcccacagcttagggatatcgcccacggtggccttcgaataacgcccttgtacaccggcaatcaccagggccttgcccgcttccatgcgtggctccaacggttgttttgtctgctgatccatacgaacagtctccttcttatgagggaacaaacccgtatcgagtataggggcatatccacgcggtactccatgcagaaaatttcctacacatctggacaactggccatcatcgaccgtattgtctgccccgcaggccaccgcagtggccgacgtcgctcggacggttccgggcgcttacgtactctcgaggcaacaatggccgaccaaggttcgccgcgccgctttgcgcgcatagatcgactccccccgtatgttttcaatatcactgccgagctgaagatggctgcgcgtcggcgcggcgaagacatcatcgacttgagcatgggtaaccccgacggcgccacgcctccccacatcgtggagaagatggtcaccgtcgcccagcgtgaagacacccacggctactccacctccaaaggcattccgcgtctgcgccgggcgatttcgcgctggtacaaggaccgctatgaagtggacatcgaccccgagtcggaagccatcgtcaccattggttccaaggaaggcctggcgcacttgatgctggccaccctggaccagggcgacaccgtgctggtgcccaacccgagctacccgattcacatctacggcgcggtaattgccggcgcgcaggtgcgttcggtgccgctggtgcctggcgtggacttcttcgctgagctggaacgggcgattcgcggctcgatccccaagccgaagatgatgatcctcggtttcccgtccaaccctaccgcgcagtgtgtggagctggacttcttcgaacgcgtgatcgccctggccaagcagtacgacgtgctggtggtgcatgacctggcctacgccgacatcgtctacgacggctggaaagccccgtcgatcatgcaggtgccgggcgccaaggacattgcggtggagtttttcaccctgtccaagagctacaacatggccggctggcgcatcggcttcatggtgggcaacccggaactggtcaacgccctggcgcggatcaagagctaccacgactacggcaccttcaccccgctgcaggtggcggcgattgctgcgctggaaggcgaccaacagtgcgtgaaggacatcgccgagcagtaccgccagcgccgcaacgtgctggtcaagggcctgcatgagctgggctggatggtggagaacccgaaggcgtcgatgtacgtctgggcgaagattcccgagcagtatgccgccctgggctcgctggaatttgccaagaagttgctgctggaagccaaggtgtgtgtgtcgccgggcatcggctttggtgagtatggcgatgatcacgtgcgctttgcgctgatcgagaaccaggaccggattcgccaggcggtgcgggggattcgcgggatgttccgggcggatgggctcgcccccaaaaccggcgcctgactcagtctaaatgtgggagggggcttgcccccgatggcggtggatcagtcaccagatgctgtgactgacactctgctatcgggggcaagccccctcccacatttgttccgcggtgtggcttagaccaccaacgacagcagcatgatgaaaatcaacgccaccactgacagaatggtctccatcgccgtccaggtcttgaacgtctcggccacggtcatgttgaagtactgcttcaccagccagaaccccgcatcgttgacgtgagacaggatcaacgaacccgcccccgtcgccagcaccaacagctcacggttaacccctggaatcatccccaccaccggcaccacaatgcccgcgccggtaatggtcgccaccgtggcagaaccggtcgccacgcgaatcaccgccgccaccagccacgccagcagaatcgggttgatctgcgcgttcaccgccatgtggccgatcacatcacccacgccgctggtcaccagcatctgcttgaagccaccaccggcgccgatgatcaggatgatcgcagcggtcggcgcgaggctggcgtcgagcagcttgaggatctgcttggagtggatgccctggcgatggccaaaggtgtacagcgacagcaacaacgccagcagcaaggcggtgatcgggtggccgatcatgtccatccagttgcgtaccacgttaccttcggcaaacgcgatgtcggcaaaggttttgagcagcatcaggaacaccggcaacagcacggtgaccagggtgatgccgaagctcggcaggtctttgttctcaggctcgcgggccagttgatcgaccagttcctgggacgggttgcccgggatgtacttggcgatgaacgtgccaaagatcgggccggcgatgatggccgtcggcagtgcgacgatcaggccgtagaggatggtcttgccgatatccgcgccaaacacgccgatggccagcagcgggccagggtgcggtggcaccaggccgtgcaccgccgacaggccggcgagcagcgggatgccgatcttgatcagcgacacgccggtacggcgcgcgacgatgaacaccagcgggatcagcagcacaaagccgatctcgaagaacagcgggatgcccaccaggaatgcggcgaacatcatggcccactggaccttctctttgccgaaggcgcggatcagggtctgggcgatctgatcggcaccgccggattcggccatcatcttgccgagcatcgtacccagcgcgaggatgatgccgacaaagccgagcaccccgccgaagccgtcctggaacgccttgatgatcttgtccacgggcatgcccgaggtcaggccgaggaagccggccgcgatgatcagggcaatgaacgggtgcaccttgaacttggtgatcagaacgatcaacccgatgatggtaaccactgcgtcgagcagcaggtaggactcgtgggacatgccaaacatggggggtctctcctgtttgttgttgttattaaagcgggtgttgaatttcctgccggggacagcgctatcttttccggcaaaaaatcagttggatggttcaaaaccgtgttgcagccaccaggtattggtctgctccgccagtgcctcgacgctgtctgcgctggcgttgagggccagggtcagcggctcgcccttgggcgattcaagggtggcgaactggctgtctatgaggctggccggcatgaaatgcccggggcgatgggacacgcggtcggcggcaacttcacgggtcagctccaggaacacgaaacccaggcccggcgcggcttcgcgcaggtggtcacggtatttctttttaagggcggaacaggtgagcacgggatgctcgcccgccttgagcgaacggcgcagttcatcgcacaggatgtcgagccagccggcgcggtcgtcgtcgttgagggggtggccggcgctcatcttttcgatgttggcggcggggtgaaagctgtcgccttcaatcgcggtggcgccgttaaggcggcacagggcctcgctgacactggtcttgccacagccggcgacacccatgatgaccagggcggtaacaggttgactcatgaaacacctcaggacgcagatagcgctacctttgcacgctgtaaggctagtgcaaaaacaggcttttcccgcgccgtcttgtcatttttatggagtgacgcgtgcatcctctccaatcatttgaaccggatcaggcaacccagcgttcaagcatttgcagctacttggagacagcgctaccttagtgcctcgatttttgtttggcaagccgcctgatgacctccaagaacgataaaaaaatgcgcaccacgggtcgcccgacccttaatgaagtcgcccgcctggccggcgtcagcccgattaccgcctcccgtgccctgcgcggcatcagcaccgtcgccaccgaactggtggaaaaagtgcagcaggccgccgccgaactgaactacgtggtcaaccccgccgcccgcgccctggcctcggcgcagagccattcggtggtggtgttggtgccgtcgctgtccaacctgctgtttatcgaaaccctcgaagccatccaccaggtgctgcggcccaagggctttgaagtgctgatcggcaactcccactattcccgcgatgaagaagaaaacctgttgcgcaactacatggcctaccagccacggggtttgttgctgaccggctttgatcgcaccgaaagcgcccgacgaatggtcgaggccagcaatgtgccttgcgtgtacatgatggacctggacccgaacgccggggtgaactgcgtgggtttctcgcaactggcggcgggtgagacggcggcggcgcacctgctgtcccgtgggcgcaagcgcctggcgtacatcggcgcgcaactggaccagcgcacgctgctgcgcggtgaaggtttccgccgcgcgttgcagcaggcgggcttgtatgacccggcgctggaactgctgacaccgcgcccgtcttccgtgggcctgggaggtgaattgttcctgcagttgctggcggcccatccggacgtggacgcgatcttcttcggcaacgacgacctggcccagggcgcactgctggaggccatgcgtcatggcatcaaggtgccggagcgcgtggctgtgctgggcttcaacgacttgccagcgtcgtcgttcatggtgccgcgcctgagcagcatcagcaccccgcgtgaggcgattggccggcgagcggcggagcatttgctgacgatcatggcgggtaacaaagtggccaagccggtggtggatatggggtttgagttgcaggtgcgagaaagcacttgatcaatgtgggagaggcaagccccctcccacattgctatcacccctgctagattggtccttctccaaatgccagggaagcactatgggacactcactgaaaatcttgggccgcacgtcctccatcaacgtgcgcaaagtactctggacctgccaggaactgggcatcgactaccagcgtgaagactggggcatcggctactcccctacccaatccgccgaattcctcgccctgaaccccaacgcccaggtgccggtgctgatcgacgaccacggcgtgctgtgggaatccaacaccatctgccgctacctcgtcggcctttaccaacgccacgacctgctccccgccgaacccgcaccacgggcgcgcgtcgagcaatggatggactggcaagctaccgaactcaacccgtcgtggggttatgcgttccacgcgctggtacgccagaaccccgactaccaggacccacagcgcatccatgccggcgtgcaagcctggaatgacaagatgggcctgctcgaacagcagttgatcaagaccggcgcctacgtggcgggtgatgagttcaccctggccgacatcctcatcggcctctcggtgcatcgctggcgcaacgcccctctggcgcatccgccctaccctgcggtgcaggcgtattaccagcgcctcagccagcgccccggtttcaaaacctttgccctcgacggccataactgagcacgctgcgggagaaagcatccccaggatgacgcgtttcaaacagtcgagattccaatcacttattgagtttccccatgcccgcactctccagtaccgacggcatcgacccgatccgtgccgcccacatcagcgcacgcatcgatcgcctgcccgccgttgcgaccgtctggcgccttgtcgcgctgctgtcgataggcggttttttcgagctgtatgacctgttccagaccgcgtatatcagccccggtctgatcagcgatgggattttccacaccggcagcgagggcgtattcggcttctcggaccaggctgcctttgcttcggcgaccttcctcggcctattcctcggtgccagcctgctcagccccatcgccgaccgtttcgggcgccgggcgatcttcacttttgccttgatctggtacaccgtcgctaccgtgttgatggggattcaaacgtcagcactgggcatcatcggcatgcgtttcctggtgggtatcggcctgggcatcgaactggtgaccatcgacgcctacctctcggaactggtgcccaagcgcatgcgcagttcggcgtttgcctttgcgtttttcatccagtttctgtcggtgccggcggtggcattgatgtcatggtggctggtgccgcaagcgccattcggcgtgtcgggctggcgctgggtggtgctgagcagtgcggtgtttgcgctgtttatctggcaactgcgcaagcgcctgccggaatcaccgcgctggctcgcgcaaaagggccgttttgaagaggccggggcaatcatcgacatcctggaagcacgctgccagaaagaccatggcaagccgctggatgagccggaaccggaagccgtcagcgtgcaaggcagtggccgctttgccgatatctggcaaccgccgtaccgccgtcgcgcgctgatgctgatcgtgttccatgtgttccaggccatcggcttctttggcttcggcaattggttgccggcgttgctgtcgggccagggcgtcagcgtgacccacagtttgctctacgccttcatcatcaccctcgcctacccgctggggccgttgctgttcgtgaaggtggcgaaccgttttgaaaacaaatggcagatcgtcggctcggcgatgggcgcgatgatcttcggcagcctgtttgccctgcaaaccacggcggtgggtctggtggtctgcggggtgatgatcaccttctgcaacgcctggctgagcttcagctaccactcctatcagagcgagttgttcccgaccaacatccgcgcacgggcggtgggcttctgctattcgttcagccgcttgtccacggtgttcagcagcttgttgatcggttttatcctcgagcatctgggcacgcctggagtgttggcgttcattgccagcagcatgctgatcgtgatgatcaccatcagttggttcggaccgcgtacgcggaacctggcgctggaaaacatcgcccactgagcaaggtagcattcggcggggggtcaatgtcgatggcacgtcccccccttcgttcgtagggcagttttatattgatcccgcctgactgtagcaaaccccgacactatcgaaacaactgccatgcctcacccaaccttggaacacgagtagctattagagctcttatatgaaatccatataaacctaattcaaaaattgccacacctctccagtaaaaagtcaaacaccgaactatgaatcgcttaccgcaacgaatctactgtcaacctttacagtagacaaaataacgcgcccatttacactcactccatctctaaaaagagagccccgctcaaactcaaacagaaaggaactcgccatgaccgcaaatacgaagccaatctccgcaagtttcataaccaataaaacgccaaaggccactgggcacttccaggtctccaagtcgcctcaaggcagtttcacaacagacacggtctttctgtcacagacagaacaatacaatatcgtggaatgctttattaaatggcccaatggagaagaagtcattattagtttgattgtcgaaaaaattccaggagagtcgaacggaacattcctcggggctggcatacgcccttggtccacttataacgctaaggacgccaacggaaatggtactttctactggtccgatcaaggctcctacagcatcgtttatatcccgaacatcaaacatgtcactggatccgtaacatccatctcaatacgtgacggagaagaagtcgaaattacatataattttgatgtttctgtctgaggttagaccttaaaacgccttgccttcgacatccatttaaatagggatcaaacgcagcccgaagctgccagtgtgccaaactggctttggaaaatatcgcccattgacggcaatggctggccgccggcaggacaacccttgccgcgtcggccacgccatccccaataaaaccgggcacttcacacccggcacgctatttgctccacctgtggcaccgcacatttccacaggtgaccgatcatgctggttaacaacaacacccaagccgtgtcgaccgttcaacagatcaaacggcccgacatggatcccgccaacgccgccgccagcgcgctgtacagcggtgccctgcaggccgcgcagcaaagcgtgaccgtgccggccgcgcagaaggaactggacaaggccgccgaccgcatcgacgaagccttcgccaagactcgtgtgcagttgcagaccagcgcgtcgacctcggatgtgccggctaccagcgccacctccggcgcacgtgccgagttcacagactacatgagcaaatctccggccgagcgtatccgcgagcaattgctcaaggagcagggtttgaccgaggcggatgtgcagaacatgtcccaggaaaagcaggacgctatttccaagcaggtggctgaacgcctgaagcagcagcaagaacagcaagtagcggcgaaaaccgctgagccgcaggcgcagacagtcaaagaaaccctggccgcgatctgacgccgcacaaccctgtaggagccccccgctcctacaggttattgcagttgcaacgtcgagttgaactgcccgatcgcgtccaccacatgccgtgacccttcctgaatttccaggatcacctgccccgcttcattcgccagttccacccccaggcccgtgcggctcaagctcgactgcatgctcgacaccgcgctcagcgacaggtcgtggttcttgcgcaccacatcgacaatctccaccgtcgcctggctggtacgtgccgcgaggctacgcacttcatcggccaccaccgcaaagccgcgtccatgctcgcccgcccgtgccgcttcaatcgcggcgttgagcgccagcatgttggtctgttcggcaatgctgcggatggtctgcacgatgctgccgatgatgtccgactgcttgctcaccgcatcaatgctttgcgccgcctggttcaggtcgtgggaaatttcttcaatgatctgcaccgtctgctgcaccacctccgagcccttgcgcgcacaggcgtcgttttgcaccgaggtggcgtgagccgagtcggctgcggttctcagggtggtgacctggtcggtgatgtcgctggcgaacttcaccactttgtacaggcgcccactggtgtcgaagatcgggttgtaggacgcctccaggaacaatgtcttgccgtatttgtttttacgctcaaagcggtgcgagtggtattcgccgcgattgagcgatgcccagaacgccttgtaggccggcgactccacttcgctgcgatggcagaacatgctgtggtgctgaccgacgatttcatccagggggtactgcacggttttcaggaagttttcgttggcgttgaggatctggccctggggggtgaactcgatcaccgccatggaacggctaatggcatcgatcaggctctggttttcatgttcatggtgaacccgcgcggaaatatccgacgcgaccttgattacgctctgcacgtgattgtccttgtccagcaccggcatatagctggcttcgagccacacttcctggccgtgcttgttcaagcgcatgaaggtgccgctgagcgcctcgccacgtgccaggtcgcgccataacttggcgtaggcatcggtgtgggtgtaagcctcatcgcaaaagatacggtgatgtttgccacggatgtcttcggcgctgtagcccatggtttggcagaaattgtcgttggcgtcgaggatcacgccggagggatcgaactcgatcatcgccatggagcggctgatggcggcgagtttggcattggattcggtcagggcgcaggaaaaacgttcaatttgttgcaggtcggatttgtgatggcggttgaacatgttcggatcaccctttcaaataccagcgcctggcaaggcgcattccattcacggattgaatattgctggcagatctttatgggaacaaccatccgaatcgctttataggccaagcgtcatcaacggttctggatgagcatagacagggcttgccgctacgcaaggtcactagtcaaccagcatttccaacagtgcgctgaccgcggctgacggtggacgactcggcgtgccgaccaaggcaaattcacgatactgaggcaccttcagcgccatcacccgcaggcccttgcgctggataggcagggctatttccggcaccagcgtgacgccaaccccctcgcggaccaggctgaaggcactgttccattcgcgcacttccactcggacatcccgcagggtcagacccgctgcggcccccaggctgcgcgcattggcggtacaaccaccggtagccagtacgaaaggctgctcaagtaactcctcaagcgacacacacgcatcagtcgggcgttgcgccagcacatggtccaccggcaacacggccatccataagtcacggcccaacacggtcgcattgcgctcaggcgtggggttgagcaccacgcccaggtcgacgaggccgctatcgagcaaggtgagcacttcgttgtcggtgacatccagggtggtgacctcgataccgggatagagctgcgcaaaacgctgcaatgcgggggtcagaaacgtcgccagcaccatcgggaaactggcgatgcggatcgtcccacgcaacatgggcctggcttcatccacagtgctgcgaatcgcctgcaaggcgccgagcatcacccgcgcctgttcgatcacactcaagcccagggccgtgggcaaggtcttacgcggttcacgggtgaacagttgcgcgcccaacgtcgcctccatgcccgccatggcctggctggcagcggactgggtcatgcccacgcgctcggcggcagcggtgatgctgccgtgatcggccacggccaccagcaggcgccagtgcatcaggttcatcatggcagtagctgtccttatggcgggggtctgaaggtttaattttacgcacggtgccacgcccgcgagactggcgcaaattcaacggagctgcctcagatgaaactgtatttcttcccccacgcctgttccctcgcaccgcatatcgtgctgcgcgaattggcgttgccgttcgacctggtgctggtcgataaccaggccaagaccaccgccgagggcgaagacttcctgcagatcaaccccaagggttatgtcgccgccctgaagctggacaacggccaggtactcaccgaagccagcgcgatcctgcaatacctcgccgacctgaaacccgccgccggcctggctccggtcaatggcagctgggagcgggtgcgtttgcaggaatggctgaattttatcgccaccgagattcatggtggcttggcggtgttcttcaacgacgcgatccagggcgacgtgcgcgcgctgttcgaggccacgctgttcaaacgtttcgcggtgctggtgcaaacgctggagcgccaggattacctgttggggtcgcactactcggtggcggatgcctacctgttcgtggtgctgcgctgggcagcattccacgcgattgacctgggccagtggccggcgctggcggcgtttcagcaacgcgtgggtgagcgacctgcggtggttaccgcactggccgctgaaaacccatgagttgagacgaagctgctcagcgccagcacatccagcgagcccgagcgatcctgatcatgcgtattcacctgtaaaccatgcccccggttagatatgtaaacgatgtccccggtttgtaccggggcaagcccgctcaccacacattcatggcgccttgaagacggcttgctgcacgtcgacctttttcgggatcaggccgttggcgaagaacaggtccgccgtgcgttgctgggtagcgacgtccgaggcttgcagcggccggatcggcgcgggcgagcggtgttcgaagtagcttttcaccaccgccggttgcaggcccagggtcttggccatcagtgcaatgctttcttcaggcttgtcgagggacaggcgctgcgccttgcccagggtctggatgatcgtgccgatggactgcgggtactgcttggcaaacgcgctgctgaccacaaaaaaactgccggccggattgaggccttggccgtcacccagcacacgggcggagccgtcgaccacggcggcggagtagtacgggtcccacaccacccaggcatcgactttgccttgctcgaacgcagcacggccatcggacggcgacaggtacaccacgttcacgtccttccattgcaggccggcgcgcagcaggcttttgaggaacaggttgtgtgcgctggagcccttgagcagcgccacgcgcttgcccttcagttcagccacgctctgcacggggctggccttgggcaccagcaccgcttcggtcttgccctcgttgggctcgacggcgaagtactgcaggtcgataccggcggcctgggcaaagatcggcgggatgtcgccgatattgccgatgtccaggctgccgccattcagcgcttcgatcagcggcgggccgccgaggaactcgatccactgcacttgcgtgccgggcagcgccgcttcgaagagtttgtgctcacgggccagcaccatgctcaccgagcttttctggtagccgatacgcaaggtggagggctcggtcgccagcacctgaccggcgatcaatgacagtaccgccgcagcgaagactttaagcatcagagcgcccccttgaccttggccgcgacatccgccggcacccattgctgccagacatccggatggtccttgaggaaggcttcagccacctggcggggcggcgtgcgtttctcgctcatgtcgccgaggatgccgttgagcaaatcaatcggcaggtcgaccttttcaaacacgctcaccagttgcgggtactgcgccttgaacggtgctgacacaccaatcgccaggcgcgccggcatcgagcgggtgccgatagggttggggtttttcgcgtcggacagggtcttccaggcgtcggcgttgaacggcggctcttccagcttgaccagcttgaagcggcccagcagcggcgtcggcgaccagtagtaaaacaacaccggcttgccgcgacggatcgacgacgccacttcggcatccagcgccgcaccggagccggtgcggaagttgacgaagctgtcggtgagcttgtaggccttgagtttctggctgttgacgatctccgaggtccagccggtggggctgttgaggaagcgcccacggctcgggtcttcggggtcgcggaacacgtccttgtagcgcggcaggtcggccaccgacttcaggtccggcgccaggggcttgataccccgcgcggcatcgcccttgatcacgaactccggcacccaccagccttcggtggcgcccttgaccgtgtcgcccaggccgaacaccttgccctcgttttccgccttgacccacgccggactgcgcccggcccattcttcgccgatcacctggatatcgtccttggccagggcggcttccaggctcacggtgctaccgggcagggtgtcggtgggcaggccgtagcccttctcgacgatcaggcgcagcacctcggtgatcaggctgccgctttcccaggtgatgtcaccgaagtggatgggtttgacggcttcgccggcatggacggttggggacagcaggctcagggccagcaggccgccgcccaggagtttcttcagatgcttcatcggcaacctcatagttgtgcggtgatgttcgttaaaagtcataactgggccgcgtgtaattcgccgctcaggtcgtcgttcattccaggcacagcctcaggcgacggttgaaggcgcgggtcatgtagtcgctgaccgaacgctgggaaatccccagctcggcggcgatttccgggtaggtcaggccattgagctgggacagcaaaaaggtcgccttgaccttggcgggcaagccgtcgagcagatggtcgatggcttgcagggcttcgagcatttgcgccagcgcttccggggatggcgcgacggaggtctcatagttatcgagagcgtcgaggtaggcgcgctccaggtcacggcgacgccacagttggtacatcaggcgctgggcgatggtggtgagcaaggcgcggggctggcggatcggcaccacgcccggcgcactcaggagctggacgaaggtgtcggcggcaatgtcttcggcgtgggcgcgggaatcgaggtggcgctgcaaacggctgcacagccagtcgtaatgactgcggaacaatccgcccacgtaatcgctgtgagaagtgtcggcgccggacatagtggctccatctgagaaggttgcacgttatgtccggtgttccggtggagcgatcctaacaaggctgcttattctttaataatatttaaaaggtatttttatataaccttattgaattatcggataacccgcgttgacggcctgatcctgatagctcaagagcaccgcatagtcgtcttcgctggcgcggagcacttcgtgcaagcccagtgtctcggccacctcgggcaagtcctgcaacgcctggttcatcgcccagcggatctggaccacctgttcatcactcaagcccaacgggccgatatagggcaaggtcgggctcggcgcactgcgggtaacgatgcgcagccccgccacctcccgtggcgcgaaacgggcgaggtagtcgtaggtcacgctgtcgatggcggcgaggtccgcacggtcttcgcgcagccagcgcaggctctcgcggtgggcgccgctgataccgacactggcgaagaaccgcccatcgcgttgcaggggtgcaaggcgttcgcgcaacaggttcatgccgctgttggagtcgtggccgttgatcacgccacggctgttgtagaagtccgccaggcggtggcgcgggttgtcgtcgcgggtcagcaacaggctgcaatgttcgccctgccggctgtggggcagctcatagcacgggcggccgatcacccggaccttgccgcgcaactgggtcatcagtggataaccgcaggtttgggtcaccagcaattcgggagccagccacagtccgggcaagtccagatgatcggcgtcgagacgacgccggcccaggcgttccaggatgcgcgacaaccactgttggttggcctgccggatcggctcgggcgcgacatacatcagcagttcggcgtagtgctcactcatgctcgtctctcacgcaaaggggtgccgggggctgtcgatggccttgagcccgtggcggccgatcaactggccgtagccttgcaccaggaagccaccactgcgtgcgatccattgttcacgccgggcgcgataaaccgtgggcagcaagtaccaaggcagtttcggcaaatcgtggtgcaccaggtgcaggttgttattgaggaacagccaggtccacggccaggacgcttcgttgagcacgctgcgttgctcgggccgggggtgcgggcggtgttcatagtaggaacggatcgaggccagggacaaggccggcacgctgaccagcagcaggtaatgccccatcgacagcgcgctgtagtgggcgatgaaacccagcatcagcacggtgataacaccgtgggccagccacatcggccacacctggggcaggcgctggcattcgtggcggatcaggcggccaatcgccaaaggggcagaaagcaggaagcggccgagcacggtcttggtcaccccatgcacgcagcgttcgaacagcgagctgtggtcccattgctgctgggagaggtagcggctttccgggtcgacgcccggcagggtcaagtcttcgtcgttgtggtgtagcaggtggctgtcgcggtacagcgtgtaggggtaccacacggcaaagggtgcatagccgaggattttattgagcagcagcgaacgggtgggatggccgtggagcagttcgtgttggaccgacaaccacagcgtcacgatcgggatcaacagcagtgtgctcaaccacaggcccagccaatggctgccgaggatcacggcgaaccaaccggcgtagatgccgatcaacagcaaccaggtcggccactcggttctggcggtaaagcgttgggccagggtttcgatttcccggcgttgggcaggatcaaggtagtgggccatcggcagctcagagcaggtgtttcctgctctgtgcaatggcgcgggaaaatcttgcagatcgtttggttctaagcttgtaactcagtgaccgaacaggcctgtctcggttttcttggctttcttgtcggcgcgtttttcatccgcggtctttgccggttttttcttcgcggctttctttgaatccatacctttggccatgatgcgtactccactttaaggggttgcagtgatgggtataccacctattgccgcgcacaaggcgtttataatccccggcccttgataacgctgcctgaagaccatgcccccattgcacatcgaaccgttggccgagccgctgtggccgctgctgaacaagttttaccgcaaccacaattcgtcgatgaaggcactcaagggcgggcgtttgtgggtggcgcgcgatggcgagattgttgccggcctgtgcctcacgcccgtggtcggcgggcagtggctgaccggggtgttcgttgacccggcctatcgcggccaagggctggcggcgcgactgatcacggcggcggcggccgatgtggacggtacgctgtggttactgtgccatccggaattggaagagatgtaccggcgcatgggcttcacccaggacacgctgttgccgcagtcgctcaatgaacggctggtgcgctacaagcgcaacaaaccgatgatcgcgatgggcttagatcgtttggtgaggtcgacctcggataatgtgtgatccgcgcgtacagggcccatgctagcctcggcggcacagtggccctttacaggatgatcatgaaaacgacgctcgcagctctctccctcactgccctgctcgccccagccttgagccaggccaccgacgccgcgatcagcgcccgacagtaccaaagcgtactggccggcagttggcgcgacccggccaacagtgcccgcgacggctatcgccacccgcagcagaccctggaattctttggcctgggcgccaagcaaaccgtgatcgagatcaccccgggcggcggctggtacagcgaagtgctggcaccgctgctcaaggatcacgggcagtacatcgccgccgtgcaagccgcgagcagcagtgcttacgcgcgcacgtcggaagagaacctgaagaagaaattcgcggctgaccccgcgcgctacggcaacgcctcggtggtggagttcgatcccacggcgccggtattcggcaaacctgcatcggcggatgcggtgctgacgtttcgcaatgtgcataactgggtagcggcaggcaccgcgtcggccacgttcagtgcgttctaccaggtactgaaaccgggcggcgtgctgggtgtggaagatcaccgggccaaggacggggcggatctgcaggcgatcaaggacagcggctacctgaccaccgcccaggtagtgaagctggcaacggatgccgggttcaagctggcgggacagagcgaggtgaatgccaacccgaaggacaccaaggattacccgggtggggtgtggacgttgccgccgacgttgaagttgggggagcaggataagtcgaagtatgtggcgattggtgagtcggatcggatgacgttgcggttcgtaaagccggccaaataatgctcaacctgtaggggccggcttgctgtggtgagtggggttcgtccgccaacccgaggggctgcttcgcagcccagcgcagggcaagcctgctcaccacaacaaacctgctcaccacaatcagcgcgtttgaaagtcagtcgtcggcagtggggtccatgtccgggaacatcacctcgataaacccgaacttgctgaagtcggtgatccgagacgggtacaaccggccgatcaggtggtcgcactcatgctgcaccacccgcgcatgaaaaccgtcggcaaaccgtacaatcggctcgcccttgggatcaaacccttcgtagcgaatctgttgataacggtttaccgcgccccgtaggccgggtacggacaggcagccttcatagccctcttccagcaccgggctgaggggggtgatcagcgggttgatcaggatcgtctgcggcaccggcggtgcgtccgggtagcgttcgctggcctcgaaaccgaagatcaccaattgcaggtcgacgccgatctgcggtgcggccaggccgacgccgcccacatgttccatggtctggaacatgtcatcgatcaattgccacaactcggggctgtcgaacatttccggcggaaccggaggcgcgatacgcagcaagcgctcgtcgcccattttcaggatttcacggatcatcgatcagacttcgtcaggggtgggcttggagtggtcccggccgaggcctgagacgtgctgtttttcatcagtgtggccgggttcgtcgaactctttttcaccggggtccttgccctcggcggacatgtgctcgatcactgcattcatctccgcgcctagcaacagcacggcggcggaaatgtagaagtacaggagcaacacgatgatcgcgccgatactgccatacatggcgttgtagtcggcaaaggttttgacgtagtagccaaagcccagggacgcgacgatccacaccactaccgccagcacggagcctggggtgatgaagcggaatttctgctcgacgtccggcatcacgtagtacatgagtgccacggcgaacatcagcaaaatcacaatcaacggccagcgcaggatggtccacagggtcaccacgaactcctgcatgccgatctgcccggccagccattccatcacttgcgggcccagcaccatcagcgcagcagcggccagcaacatgccggcgatgccgacggtgtagaaaatcgacagcgggaagcgcttccagatcggccggccttccaccacgtcgtaggcggcgttcatcgcgctcatcatcaggcgcacaccggccgaggcggtccacagcgcaatcacgatacccaccgacagcaggccacccttggattgctgcaactggtcgatcaccgggttcacctgctcgagggcctggggcggcaacaccagttccgactgcaggcgcagccaggtgaagaagtccggcaggtgcaggaaaccgatcagggcaatcaggaacaacaggaagggaaacagcgagaacagcatctggtaggccagtgcagaagcataggtaggcatttcgtcatcgacgaattccttgacggtacgcaacagcactttgtgcagcttgagaccatcgagaaccggaaaaatcatagcgtctcctttcgccgcaaaaagttgagtttgtgggcgactcaggggccgttttctacatcaaggtagcctatttggcgaccttgaaacaatttcgaaactttaatcacgccgtgtgacataaaaacggccatccgtggatggccgtttggactgcttgaaagcgcgtttacttggtcgcttttttcactgcgtccttggtgtcgcctaccgctttctgcacttcgcctttcttttcctgaatgacgccttcagcgcgcagtttgtcgttgccggtgactttaccgacaccttgcttgatattgccgaccgcctcgtttgccacgcctttaatcttgtcagatgtgctgctcatggtatttctccgaaagaacaatcaaggtttttgggtcattacctaaagattgacccgaggccgttgcgcagagtttcaaatatttttacccaggcatttcatcgccgaccgcaggtttggctttatgttttgcggccaacccacgagaatgcccggcacattcaggctataacgctgaataacagatcccgtaggaaggttatgaaactcaataaagcacaggccatcgcccgcagaaacaccgaactgggcggagccgtactcggcgtcaacaactgccacttcaccgacctggaccgcaagcgcaacatctggtggttcgacctgccggtgggccggattgccgtgggccagtacgagtggatccacctgttgatgcacaacgccgagaccgaccagttgttgcacctgaaggtgccaacgctgttcttgcgtgaaaagctcgaaggcctggtggtacgcaatgcgggcaagcgcaaaccggagatcactctggagctgagcgcggacaaggattcgttcttgaaggatgtgcgtccggcagggactggcgtgagcttcgcgcagttcgccctgtaaaaaacgctgttcaaaatgtgggagggggcttgcccccgatagcggtgtatcagtcagcacatcggtagctgacacactgccatcgggggcaagccccctcccacattggtagagcgttactttttaagaccgagcttcttcaactcttcatcgcgcagctcacggcgcaggatcttgcctacgttggtggtcggcaacgcatcgcggaattccacggccttgggcactttgtacgcagtgacgttggcgcgcatatgctccatcacctgctccttggtcagggtggcacccggcttgaccacgatgaacagcttgatgtgctccccggacttttcgtccggcacgccgatggccgcgcactgcagcacgcccggcagacctgccagtacgtcttccagctcattggggtacacgttgaagcccgagaccaggatcatgtccttcttgcgatcgacgatgcgcatgtagccgtcaggctggatgatcgcgatatcaccggtcttgagccagccttcgctgtcgagcatctcgtcggtggcgtcctggcgctgccagtagcccttcatcacctgcgggcctttgacgcacagctcgccggtttcacccagtgcgagttcagtgccgtcatcggcgatgactttacacacggtggacggcaccgggatgccgatggtgccgatctggatatgctggatcgggttcacggtagccaccgggctggtctcggtcatgccgtagccttcgcaaatgccacaaccggtcaccgccttccagcgctcggccgctgccaattgcagggccatgccgccggacagggtgactttcagcgcagagaaatccagcttgcggaacgcttcgttgttgcacagcgccacaaacagcgtgttcaagccgacaaagccgctgaacttccacttcgacagttccttgaccatcgccggcaggtcgcgcgggttgctgatcagaatgttgtggttgccgatcagcatcatcgccatgcaatgaaaggtgaacgcatagatgtggtaaagcggcagcggcgtgatcaggatctcgcagccttcattgaggttggagcccatcagcgccttgcattgcaacatgttggcgacaaggttgcggtgggtgagcatcgcgcccttggccacgccggtggtgccgccggtgtattgcagcacggccacatcgccgctggccgggctggcatcgctgaccggttggccgtgccccttggccagcacgtcgttgaacttgatcgccttgggcaggtgatacgccgggaccattttcttcacgtacttgatgacgctgttgatcagcaggcgcttgagcggcggcaacaggtcggcgacttcggtgacgatcacatgcttgacggcggtcttgggcacgatcttttccgccaggtgcgccatgttggccaggcacaccagggccttggcgccggagtcgttgaattggtgttccatttcccgcgcggtgtacagcgggttggtgttgaccacgatcaggccggcgcggatcgcaccgaacacggcgaccgggtattgcaggacgttgggcagttgcacggcgattcgatcgccgggcttcaagtcggtgtgctgttgcaggtacgcggcgaaggcgccggacagttcgtacaattcaccgtaggtgattgtcttgcccaggttgctgaaagccggtttgttggcgaagcgctggcaggactgcttcagtaccgcctgaatattcggatactcgtctggattgatttctgcggcaatcccggcggggtacttatccttccaaaagtcttcgttcatggaagcccactcctcagcgacgtcagcgacgcgaattcatcatcgcatttgatgcgattattattggtgtatgtttttttaggtgaatctggcgctttcaagcaggccgagacgtcacaaagcgcgccgagagtagcagctttgccaaaggccgcctagagccaaaagagggggccacggtcataaacacgactgtcctacaatatttggtcacactttaaaccaagctgaaatagcccgataaagagctctggaacagggctttcagaacagcaaggtacaaatgtgggagggggcttgcccccgatagcagtggttcagtctacacatctggtgactgtcccaccgccatcgggggcatgccccctcccacaattttcagcacatttcagatcaagcgatatcgcgcagctccctgcgcaagatcttgcctaccggcgtcatcggcaacgagtcgcgcaacacaatatgcttaggcaccttgtacccggtgaagttggtcttgcagtacgccttcaactcctcaaggctcaccccttcggcacgcgccaccacgaacagcttcaccgcctccccggtgcggtcatccggcacaccgatcacggcgcagttggccaccgccgggtgggccatcaccacgtcttcgatctcgttggggtacacgttgaaacccgagacgatgatcaggtctttcttgcggtcgacgatgctgacgaaaccatcgacatcgatcaccgcaatgtctccagtcttcagccagccttcggcgtccaacgcctcggcagtggcgaccggttgctgccagtagcccttcatcacctgcgggcccttgatgcataactcaccgcgctcgcccaacggcaactcgtgaccttgatcgtcgatgactttcatcgcagtgcccggcaccggcaggcccacggtgcccaggcgcgactggctgccgtaggggttggtactggccaccggcgaggtctcggtcaggccgtagccttcaccgatggagcagccggtgatggccttccagcgctcggccgtggccttcaccagtgcggtgccgccggaattggtgatcttgaggtgggagaagtccagggtcttgaagtccggatggtccatcaacgccacaaacagcgtgttcagccccagcaggcaggagaaccgccacttcttcagttccttgatgaaaccgccgatatccctcgggttggtgatcaacacgttatggttgccggtcaccatcatgcacatgcagttcgccgtgaaagcatagatgtggtacagcggcagcggcgcaatcatcacctcctgcccttccctcaccagcggctgtccatcatcggtgacctgggacatgcacgcccgcgcctgttgcatgttcgccaccaggttgccgtgggtgagcatcgcgcccttggccaggccggtggtgccgccggtgtattgcagcaccgcgatgtcgtccagggtcaccgggtggcgggtcacgcccaggcccgcgcccatgcgcagggcgcgcttgaatgacaccgcgcgcggcaggttgtaggccgggaccatcttcttgaccttgtcgaccaccgtgttgatcagccaacctttggcagcgggcatgaaatcgcccatcttggcttcgatcaggtagtcgatctcggtgtcgctgcacacctcctgcacccgcgaaccgaacaggttgaggtagaccagcgcacgcacgcctgcgtccttgaactggtgacgcatctcgcgcggggtgtacagcgggttggtgttgaccacgatcagcccggcgcgcaaggcgccgaacacggcaatcgggtaatgcagcacgttgggcatctgcaccgcgatgcgctcgcccggcttgaggtcggtgtgctgttgcaggtagccggcgaaggcggcgctctggcgctccagctcggcgtaggtcagggtgatacccatgttgctgaatgccggacggtcggcgaaggccttgcaggagcgctcgaagacttcgatcaccgacttgtaggcagagaggtcgatgtcgttgggaacgcccgctgcgcgtttgtcattccagaaatcaggttgcattattcttgtcctcttacctgagtgtgtccggccgctttctgactgctatgaaaagcggagctttggggacgttagcagcaatagccaaacaggcaaatacagcaaaccgtgtcattgattgtatgaatcttgccgctgacgtgtaggcagatgcgccgatcctcggcagatgagctatacactgcaacaaccccgagctgaccttgagcagcccctgagcaaaggaaccgccatgaaccacagcaccttctggctgaccgcgaatgaccgcagccgcctgtacgtcaatcaatggatgcccgaaggcccgaccagggccctggtgatgctgtcccatggcatggccgagcacagcgggcgctatgcgcgcctggcgcacaccctgtgcgacgccggctacggtgtgtatgcgccggaccaacgaggccacggccgcacagccgacgaaggcaccctgggcctgtacgccgagcacgacggctggaacaaggtagtgggcgacctcgccagcctcaaccagcatatcggccagcagcagccagggttgccgatcattctgttgggccacagcatgggcagttacatcgcccaggcctatctgctgcaccacagcgccagcctggatggcgcgattctcagcggttcgaatttccagccagtggcgctgtaccgcgccgcgcgggtgatcgcccgggccgaacggctgcgccaggggttgcgcgggcgcagtgcgttgatcgaattcctgtcgtttggatcgttcaacaaggcgttcaaacccaatcgcaccgctttcgactggctcagccgtgacccggccgaagtggacaagtacatcaatgacccgctgtgcggcttccgctgcaccaaccagctgtggatcgacctgctcggcggcttgcagcaaatcagcaaagcgtccaatctcgcgcagatcgatccgggcctgccgatcctggtgatgggcggtgaatgtgatccggtgagcgaaggcaagcgtctcaacagcctggccaacgccctgcgtgaagcgggctgccagcacctgcaactgaatatctacccgcaggcgcgccatgaagtgttcaacgaaaccaaccgtgatgaagtcacggcggatgtactcagctggctcgaccaggccctgacgttgcgcaggcccacccgctgcgaataaattttcgattaaaatcagtcagttaaattaccgattagccacaggatgcacgtttagatgacccaggtaaccaacaccccgtacgaagccctcgaagtcggccagaccgccagctacagcaagctggtggaagagcgtgatatccagctgttcgccgccatgtccggtgaccacaacccggtgcacctggatgccgagtacgccaaggcgaccatgttcaaggagcgtattgcccacggcatgttcagcggcgccctgatcagcgcagccgttgcctgcgagctgcctgggccgggcacgatctacatcggccagcagatgagcttccagaagccagtaaaaatcggcgacaccctgactgtgcgcctggaaatcctcgagaaactgccgaagttccgcgtgcgcatcgccacccgtgtgttcaaccagcgcgatgagttggtggtggatggcgaggcggaaatcctggcgccgcgtaagcagcaggttgtgacattgaccgagttgccgccgatcagcattggctgatagcaatttcaggctcaacacaacaccaatgtgggagggggcttgcccccgatggcggttgatcagtcaatgaatcggttgactgatactccgccatcgggagcaagctccctcccacattggttacagcatttacaaccctgggcttacgactgagcgcgagcctggttacgcagggctttcacctggtcgtggttgcgttgcacgccatggtactgacgttcaaccaggtcacgaatgcccagcaggttgtgcttgttgatcttctcgatcgcttccttgtaagccttcagtgcgtggtcttcaccgcgctcggcttcgttcagcaccgcctcttcatctttaccggtgagcatcgacttcacgtcgacccaaccacgatgcaaagcgccggcaacgctgccggaatcttccggatcaccacccagggcacgcacggcggtcttcagctcggcagcagcggtggcgcagtcggctgaacgcttggcgaacagggctttgagttctgggtgcttgatgtcttcagcgcactccttgaaacccttttggccgtcgatgctggtttcgatcaggtcgttcagtacggagatcgattctttattgatgtcagtcatttttcaattccttgtacgggttagaaggttgtcttagtggttgcagcgcccgtgccaggttttcaaaaaacaaattattcatatatttcagttatttacgattaattgaaccatctgtatgtacgttatttgcatgatctgtcatttggccttcatgcagaatgcctgtattttccaacgtcacgactcaaacacccgagcctgcatgaatcccgaaaaactcgaactgctgatcacccgcgaaatgcccttcggcaaatacaaaggacggatcatcgccgacctgcccggcccgtacctcaactggttcgcccgtgaaggtttcccccacggcgaactgggcggcttgctggcgttgatgcaggaaatcgacagtaacgggttatctgaattactcgaaccgctacgcgccaaacacggcaaacccgcaccgcgccattaagagccccccctatgccaaggaatgcagacaacgaacgtcattggcaggctgtttccgagcgctatgccctggaacccggcccgatcaatctggaaaacggttacttcggtcgcatgagccgaacggtgcaatcgcattacctggaacaggttgcgtttatcaaccgaagtaattcgctgcatgtgcgccaacgcttcgagcaaggcgagaacgtcgagattcgtcggcaactggccgagctgattgatgtggacccggagtcggtggcctttacccgtaacgccaccgaagccttgcaatcactgatccgcaactacaaccgcctgcaaccgggcgaccaggtgctgatcagtgacctggagtacgacaccgtcaagggtgcgatgcgttggctggccggcgttcgtggcgtggaggtgatcgaactgtcccacgcacacccggccagtttcgacagcctggtgcagacctatcttgatgcgtttgtgcagtacccacgtttaaagctgatggcgctgacccacgtcacccaccgcaccggcctggtgatgcccgtcgaagccgtcgccaaggcagcgcgcgagcatggcgtggacgtgatcctcgacggtgcccatgccctggggcagatcgagttcaacctggccgagctgggcattcagtttgccggcttcaacctgcacaaatggatcggcgcgcccctgaccctgggctttttgtacatcgccccggagcgcctggccgatatcgacccggacatgggtgagtttcactaccccaccaccgatgtgcgtgcgcgtacgtcctacagcacgccgaactttccggccttgatgaccttgccgctggtgtttgaagaacatcgcgccttgggcggctcggcggccaaaggtgcgcgggtcaattacctgcgggacctgtgggtgagccaggtgcggccgttggcgggaatcgaggtactgacgtcggatgatccacggctgtattgcgggatcacggcgttcaagtttgtagggcgggatcagcaggtgatgacagagcgattgctcaaggattacaacctgttcaccactactcgggtgggcgcggcgtttggtacttgcattcgggtgacgccggggttggtcacttcggcggcggatatcaatgtcttggtaaacgccatcaccgaactaaacaccgattaaaactgtgggagctggcttgcctgcgatagcggtgggccagcgaatgcatgtgtgactgatacaccgccatcgcaggcaagccagctcccacatttagagtggcgttggtcttaaggttttcttcaggcaaaaaaaagcggtacaccgaccaagtgcaccgccaaaaatgccgttaagcacagcaacaacgattcgataaatcagtccagcagcgccagtgcctgcgcggtgacttcctggatacgggcccagtcgccgttcttgacccactccgggtcgagcatccagctaccgcccacgcacatcacgtttttcaacgccatgtagtttttgatgttggccgggccaacgcctccggtcgggcagaatttcacttcgccgaacggaccgcccagggccttgatcgccgccacgccgccgctgacttccgccgggaacagcttgaagcgacgataacccagaccgtagccctccatgatgccggaggcattgctgatgcccggcagcagcgggatcgggctgtgtaccgaggcttccagcaggtcacgggtaatgcctggagtgacgatgaattgcgagcccgccacttcggccgcttcgagcatgtgacggtcgagtacggtgccggcccccgtgcacagttcagggcgttgttcgcgcagtacctgaatggccttgaggccgaactccgaacgcagggtcacttccagtgcggtcaaaccaccggctgccagggcatcggccagcggcagaatgtcctgttcgcgggcgatggtgatcaccggcaggatccgcgccttggcgcagaggctgtcgatcaaggcaactttgtccgccatggacacggtcggttgagggcttttcatagcggctgatccttggctcatgggcaccagtaaatctctaatgtaggttgcagaaacgcgcgaatcggcatggcagcgacgtcatcactggccagcgcggcgctcaaggtggtcaatttcgaactgccggaaatcgacagcacggtgtagttcgccgtggccagcaacgcgcgactcatggtcaggcgctggtgcggcacggtcggcgccagcatcggccagcaacgacgggtaccgtcgggctgcaaggcctggctcaggttcgggctgtcgggaaacagcgatgcggtgtggccgtcatcgcccatgcccagcaccagcacatcgatggctggcaattcggccagcaggcgatcggcctgctcggcagcgtcttcgaggttggcggcagcgctgtacaggctcaagaacctggccttggccgccgggccttgcagcaggtgctgcttcaacaggccggcattgctgtcggcatgttcgaccggcacccagcgctcgtcggccagggtgatggtgaccttggaccagtccaggccctgcttggccaggtgctggaaaaacgccacggggctgcggccaccggacaccaccagggtcgcttcgccacgggcactgatggccgtgcgcagttgctcggccacgtcattggccaggccttccgccaacagcaccggggtacggtactcatgaggggttacaccctggggcagtttcaaatcagatatcgccataccacgacctcccgtcccgcgtgatcagtgcaatcgagctcatcggcccccaggacccggccgcgtacggcttgggcgcatcaccggatttcttccacccggcgatcaactggtcacaccacttccacgcggcttcgatttcatctttgcgaacaaacaggttctgattgccgcgcatcacttccagcaacaaccgctcgtaggcatccgggatccgggcgctgcggtaggtgtcggaaaaattcagttgcagcgggccgctgcgcagttgcatgcccttgtccaggccctgctccttggtcatcacacgcaaggaaataccttcgtccggttgcaggcggatgatcagcttgttgctgatctgcaggcgctgctcgggggcgaagatgtagtgggacggttccttgaagtggatgacgatctgcgacagcttctgcggcatgcgcttgccggtgcgcaggtagaacggcaccccggcccaacgccagttgcggatatcggcacgcagggcgacgaaggtctcggtgtcgctctgggtgttggagttttcttcttccaggtaacccggcaccggcttgccggcgctgtagccggcgatgtactggccgcgtaccacctgagtggtcaggccgtccgggctgatgggcgccagggccttgagcaccttgaccttctcgtcgcggatgctgtcggcggacaggtcggccggcgggtccatggcgatcaggcaaagcagttgcagcaggtggttctggatcatgtcccgcagctggccggccttgtcgaagtaaccccaacggccttcgataccgacctgctcggccacggtgatttccacgtgggaaatgtagttctggttccactgggtttcgaacaggctgttggcgaaacgcagcgcgatcaggttctggacggtttctttgcccaggtagtggtcgatgcggtacgtgcggttctccgggaagaactgcgccacggcgtcgttgaccttgcgcgaggattccaggtccgaaccaatcggtttctccagcaccacgcgggtgttgtccgccaggccgaccttggacaggttctcgcagatggcgccgtacaccgccgccggggtggcgaagtaggcgatcaggcgctgctcggtaccggcgatgtccgccagggccacgtagtcatcagccttcaggaagtcgacgtgcacataggtcaggcgcgccaggaagcgctgggcgatggtttcgtccagttccttgccgacgaactctcgcaatgcgtgctcgatgtgcgccaagtgctgttgttcggtgccggcttcgcgggccagggccagaatgcgcgtgtcgtcgtgcagcaggccggcgccatcgagttgatagagggcaggaaataacttgcgcagcgccagatcacccaaggcgccaaacagggcaaaggtgcagggttctacggttatcgaaggcatgatgtttgttcttttatcaagttaagctacaaataccttttttcaaggcatcactcaaggaaaaatgtagtaataaccacaacattttcccgaaatacgcattccgagtggtggtgttcagctaccctcagtaggataggccaccgcaaaaggccactcgtcgattggttgccaccctaatttgcatcgtcgcccgaaggaaagactgaatggaccgcgtgcgaaatcttctggaacagatccggaaccgcctcgaagaattgaacaaggccgagaaaaaagtcgccgaggtcatcctgctcaacccgcagcaggcgacccgcttctccatcgccgcccttgcccaggccgcctcggtcagtgaaccgacggtcaaccgtttctgccgttcgttcggcgtgagcggttaccctgaactgaaattgcagctggcgcaaagcctggccagcggcgcagcgtatgtcagccgcgcggtggaggccgatgataaccccgaggcctacacccagaagatttttggcagcgccatcgcgtcgctcgacagcgcctgccaggccctggacccggccctgatcagcaaggccgtggacctgttgatccaggcgcggcagatccacttcttcggcctgggtgcttcggccccggtggcgatggatgcgctgcacaagttcttccgcttcaacctggccgttaccgcccatgccgacgtgctgatgcagcgcatgatcgcctcggtggcgcacactggcgagttgttcgtgatcatttcctacaccgggcgtacccgtgagttggtggaagtggcgcgcatcgcccgtggaaacggcgcttcagtgctgggcgtgaccgccgagaactcgccgctggccaaggccagcacggtgagcctgaacattccactgcccgaagacaccgacatctatatgccgatgacctcgcggatcatccaactgacggtgctggatgtactggccaccggcatgaccttgcgtcgcggggtggatttccagccgcatttgcgcaagatcaaagagagcttgaatgacagccggtacccggttggggatgagttcaactaagccggcctttgtgttggctgtactggcctcatcgggggcaagccccctcccacactttgatctgtgaatacattcaaaatgtgggagggggcttgcccccgataaggccagcagccacactgctatacccctgctcgagcctgcaaactcaaatgcgccctctcccccggcgccaggctcgccccggccatcgccgactccacgcacacaaaccccgacgcctcgttgaagctcacgcccaacagcggccggctgcccgggtgccacaccaccgtgtcggcgctgtcgccggtgtcgatgcacagttcgcgctgccaggcgtggtccttgagctgcaattcgccctcgtgctggaacacccgctggcaaccgccctccacccgcaattcaccttcctgctggcagacctgacgattgagctggtcgtaaccttgcgcaccgtcaagcccagacagcgctatctcatcaacatgaccaatacgccaataagcgtgcaatgcatggctcagctggcacggcaactcatcctgatgctcggtgctcaggcgcagctccagggtttcgcccaggtgcgcatgcaggtcgacctgccagtcgcacagctgcaattgccagtgcaggcgcacaccgtcgtcgtcggtgctgctgtcgagcaatttccagtcgatcaagcgcgcccagccatgggacggccaggcattttcactcgggtggcggccataccacggccagcacaccggcacgcctccacggatggcaccgacttgcggccacttggcggcacaccacaaccagggtttctggccggtcggctgaaagtgcagcaattgcgcgccttggcgactgaacaccgcctggcacagcggatgatcgatcaccaacacgtcacgcatctggaaacgctcccaggcgaacaccgggcgctcgcgcaaggatttgaaaaagcgttgcagcggttgctcatgcatgtgccacagtcctgaaaatcatcacaatgcagcccaaaaaaaagcggatagccatggctacccgcaaaatgcgcacagagagaaggagcttatcgcaacagcgttagaacgtagactgaattttcaggccagccaccaacgcgttgtcgactttgtccacgccgccaggctggacgacgtattgcaggttaggacgcacggtcagccagttggtgacgtggaagccgtagttgatttcgaagttgtactcggtttcgcggattggcgtgtaaagcgcattgtcgtagtcgttcacgccattggcgacgttgagcagttcggcgtttttcttcacgtcgttgttgacgtgcagacgcgcggcaccaatacccacgtcgtcttttggacgcgcatcgaatgggcctttgtacaccagcatcaacgactgatagttgtcgaccaggttggtttctttgtcgtggaaggtggcgttggccgcgatgttcagaccgcgggaagcgtcgccgttgtgcgtggtgagctgctgttgggcaacgaaccagtagcctttcttgctgctgtgggtacggtaggcggcgccagtggtcgctgcatcgttgccgttgatgtcttcacggacgtcagaggcatcagccgcgctcttgtagtaacccacacggtattcgcccggcaggttgttgaccttaggcgaccagaccaattccaccgggatcacggtgcccttggtgccgctgccgctgagcttgaagccgttgccgtgctccagctgcgacgggttctggttgtacgcaccgatctgcgcatacagctcaggcgtgatgttgtacttcacgcggatcgcggcctggctgaccggccagttgtaccaggtgttgacatagttacccacttgcgagccgcagaacgacaggttctggaagtcgcacgggaaggtgttgaagtcttcgccttcgccgaagtagccgagtttcacgtccaacttgttgtcgaacatctggtgctggatccagaactgggtcagacgcaccatgtggccacggccgtagacttccatcgaagagctcagcgtgccggcacgcgggtcgccaatgcggtcgttggagatgttctggccattacggttggtcaactggatcttggcctgggtattgtcccagccccacagtttttgcaggtcaagtgccacgccgagaccgaactggtcagagtaacgaccggttttgtcgtggttgtagccgcccttggcgttgtagcccatctccccaacgtagtcagccttgatgtcgataccttgctcgatcagcttggtacgctcaccgccccaatcgccggtcatccacttggaatcagcgctgaatgcatcggccgccatcgcattggcggacagtaccagggctgctgcagctgacatttggcagatcagccgagtgttgttgtgttgctttttcatccctacatcctcgtctttattgttattaaactgtttttatctaacgcggtttactttttttatctaaaacaacaacttatctgcttcagcggcctttgaattgggccacgttgtcggcatgcccctgtgtgggcgatgaagaaacagtgcccagtcgctcgcccgtgttggcgtcgaacagcagtaccttggaaggatcgaattgcagggtcagggtctcgcccacctgcggtgccacgtcgggtgccaggcggcagcagaccttggtgtcattgagttgcacgaacaccagggtgtccgggccggttggctcggtcacctggacttcggcacgaatgctcgacgcactgttgccctcgcccgccgccaacatgatctgctccggacgcaggcccaggatcacgtcgcgatcttccaggccggcatccgtggtgttcagggccagctcacaacgcgcctggccgctgtcgagcaatgccaccaggcggccgtccttgcgctgcagacgcagcggcacgaagttcatcggcggcgaaccgataaagctcgccacgaactggttggccggattgttgtagatctctttcggcgtgccgaactgctggatgatgccgtccttcatcaccgcgaccttgtcgcccagggtcatcgcttcgatctggtcgtgggtcacgtagaccgtggtggtcttgagacgctggtgcatcagtttcatttcggtacgcatttcgacacgcagcttggcgtcgaggttggacagcggttcgtcgaacaggtagatcttcggccgacgcgccagggcacggcccatggccacgcgctgttgctggccgccggagagctggccaggcttgcgattgagcaggtgttcgatctgcagcagcttggccacccgcgccacttcggcgtcgatatcggcctggggcatcttgcggatcttgaggccgaactcgatgttctcgcgcacgctcatggtcgggtacagcgcgtaggactggaacaccatggcgatgtcacggtccttggggctcatgccgctcacgtcctggtcgccgatcatgatcgcgccgccggtgatggtctcaaggccggcgatgcagttcatcagcgtggatttgccgcatcccgaaggaccgaccaggatcaggaattcgccttccttgatcgacagttcgatgttcttcaaggtgtcgggcaggccggcgccataggtcttgtttacattgcgaagttcaagcgtagccatgattaccccttgaccgcgccggccgtgaggccgcgcacgaaatacttgcctgcgatcacatagaccagcagggtcggcagcccggcgatcatcgccgccgccatatccacgttatattccttggccccggtgctggtgttgaccaggttgttcagcgccaccgtgatgggctgggagtcgccgctggagaacactacgccgaacaggaagtcgttccagatctgggtgaactgccagatcaggcagaccatgatgatcggggtcgacatcggcagaatgatctgacggaagatggtgaagaagcccgcaccgtccagacgcgcggccttgatcagcgcatccgggatgctcacgtagtagttacggaagaacaacgtggtgaacgccagcccgtagaccacatgcacaaacaccaggccggtggtggtgctggccaggcccatcttgccgagggtgaacgacgccggcagcagcacggtctggaacggcaggaagcagccgaacaacaacaggccgaagaacagctgcgaccccttgaagcgccagaacgacagcacatagccgttcaatgcaccgatggcggtagagatcagtacggccggaacggtgatcttgatcgagttccagaagtagccgtccacagtcgcccaggccttgacccagccgatgccggtgaccacggtcggccagctcagcaggttgccggagctgatgtcttccggggtcttgaagctggtcagcagcatcaccaccagcggcaccaggtacagcagcacggcgaggatcagcaccgcgtagatcgcgatgcgactcaggctgatggcaggtttggaggcgagactagtcatgacgtttggtcctcagctcggagtagaggtaaggcacgatgatcgcgaggatcgcaccgagcatcaggatggcactggccgaacccatgcccatctggccacggctgaaggtgaacgagtacatgaacatcgccggcaggtcggacgagtagccggggccgccagcagtcatcgcggctaccaggtcgaagctcttgatcgcaatgtgcgccaggatcatcaccgcactgaagaacaccggacgcaggctgggcagcaccacgctccagtagatgcgcggcaggctcgcgccgtcgatctgtgcggcgcgcacgatcgattgatcgacgccacgcaggccggcgagaaacatcgccatgataaagcccgaggcttgccacacagcggcgatcaccaggcagtagaccacgcggtccgggtcgatcagccagtcgagacggaagccttcccagccccagtcacgcaggagtttgtccaggcccatgcccgggttgagcagccatttccaggcggtaccggtgacgatcatcgagagcgccatcgggtacaggtaaatggtgcggataaagccttcgcgacggattttctggtcgaggaagatcgccagggtcacgccgatgaccagggtgatgccgatgaacatcccgccaaacaccgccaggttcttgctcgctacccaccagcggtcgttgtcgaacaaccgcgcgtattgcgcaaggcccgcccatttgtagcttggcaggaacgtggaattggtgaacgagagtacaaacgtccacaggatgtagccgtagaagcccaccaacacgatgaacatgctgggcgccagcaccagtttgggtagccagcgctgcagtgcatcgaacggcgaggctttgctgaacacagcaacagaactcatggggaaatccagtacagggaaaaaggactacaggaacaagccttgcggggggccagggagtccccccacaaggtcaaccgttacttggcggacttgatcgcagcgccaagtttcttggcggtgtcggccgggtcggctttcgggtcgttgatgtagttggtcacgacgtcaaagaacgcaccttgcaccgccagggtcgtggccatgttgtgcgccatgcttggctgcaggccgccggtcttggcgtctgccaggaagtccttggcagcggtctgggcgcaggagtcgaagccgtacgagtccattttgttcagcatgtcgttacgcacagggatcgaacccttgttgatgctgaacactttctggaagttttcacccagcacgactctggcaatgtcctgctgaccggcagcagtgcctttgtctttctgcttgaacaccgccagggagtcgatgttgtaggtgaaggctttgtcggtgcccgggaaggctacgcactcgtagtccttgccggcgactttcttggcggcggtccattcggacttggcccagtcacccatgatctgcatgccggccttgccgttgatgaccttgcctgcttcgaggttccagtcctggcctttgccgtcgacgtccatgtaggtcgcgactttcttcagctcggtcaaggccttgaccatttccggaccggtcagtgcggcgttatccaggtcgaccagggctttcttgtagccatcggcacccatcaccgagagcaccaccgcttcgaacacggtgctgtcctgccaaggctggccaccgtgggcaagcgggatgaagccggctttcttcagcttgtcgccggcggcgtagaattcttcgagggtggtcgggttcttggtgataccggctttcttgaagacttccggattgatccacagccagttcacgcggtggatgttgaccggtacggcgacgtagtcaccttcgtacttcacggtatcggagactttcttgtcgagcagggagtcccacttttcttctttggcgacgtccttgagcacgtcggtgtcgagcaggccagtggacgcccattcctggatgtcggggcctttgatctgggcaacacctggcgggttgccggcgactgcacggcttttcagcacagtcatggccgtggcgccaccgccacctgcgacggcaccgtctttccaggtgaagccgtctttctcaacttgggccttcaggacatctacagccgccttctcaccacccgaggtccaccaatgcacaacttcaaccgtccctttcgagtcggcggcaaatgcactgaggggaaacaacgaggcaatggaaatagcgacggcgaggcgattaatcgcgttcatctgagtaccttttcttgttgttatgcatgcaagtcttaggcttgcgctgcacggagtttaaacagggttttttgaggcgcaggtaacaaagggatgcacaaatgtcaccagttggtgacatagcgcccagccccgatggcactggccatgctgggtgccaagggcagtgcgggcagcacgaccgcttgccaggcatggtacaggtccggcttgccgccccatattttgctgctgggttggttgtgcgggctgagttcgtggtgccagctgccgtggatgcggtcgataaagtgggtttcgcagaactcccagaaacgccggtaccaggtttcgtaatgcaattcgccggtgcgtttgagcaaggcctgggcagcggcgctggcttcggcgtgggtccagtgcaggcgctcgcgcaccaccgggcggtggttccagtccagggtgtagacgatgccgggggcgccatccaccgcccaggcgtaatcgcaggcactggcaaacaggcctttggcatcggtcaccagccattcgggtgtggcgagcccggcttgcaagcgcgcggcctcaaggtgcagcaccagccgcgcccattcgaagccatggccgggggtgatgccgtaggggcggaagccatcggcggggttgtcttcgttgtagccgagcaagggctgccaggtggtgtcgaaatgctcgatgaccatgtactggttgccggcggcatgggtgtggatcacacgttcgacgatgcgcagggcgcggtccagccagcgtgtatcgccggtcacatcggccagggccaggaacgcctcggtagcatgcatgttgctgttggcgccgcggtaggcttcgacgccgctccagtcctgggcaaaggactcaagcatcacgccctcctcctcgctccagaagaactggtcgatgatatggatggcgtcgttcagcaggttttgcgcgccgggagcaccggccaccaccgccgagctggcggccagggcgacaaaggcgtgcaggtaggcggccttgccacggttgccgtcgacggcatggggcgtggcgaaccagccaccgtgctcactgtcgcgcaacgggccgttgagggaggcaaccccgtgctcaatcagttcggcgtaaccgggcaaccccatggcgtgggccatggcgaagctgtggatcatgcgggcggtgttcatggtttcggcgcgggcatcggccggcaaccggcctttgtcgtccaggttgccaaagccgtcgggcagtcgagacgccttggcaaacgccagcaggcgctggccttcggcagcgagccagacgtgatgggcaggcgcgttcagccaactgctggcaggcagtggttgggtggtcatggggggcccttattattgtttgtgggatcaccggagtctaaacaagggcgcggtgggggcaagtaacgaaggggatgggaaatgtcaccgagtggtgacatttccatcagagactttattgcccgagcggggtgactctcgccggcgcgttgagctgttggttgagggtctgcacctggctctgcaaggtggtgatattgcgcgtggtctggatgcggaacacgtcgaactccttgttggtaggcccatcactgctggccgacgcgttgtcctgggcgctcttgagcaccacgaggtcctgttcgatacgggcgatggcggcgctggggttgccctgtttcttcaatgcggccacgtcggcggtcagttccttgatctcgttatcgcgcttggccgcgtcaccttgtgccgccttgagcgttgccacggcgtcggtcaacgcctggacctggccttgcagcttgctgttggcattggacaggtcagtggtgctggcggtcatttgcgccaggcgcttgtccagctcggtggcctggccggccacaccgacttgctgcttgccctgctccagcagctggctttcaagctgcttgatctgcagtttcagcgcttcgctgccgttgttgacgctggcctcgctggccaccaccttgccggaaatatcctgcaggcgccccgccgcttcttcgctgatgcgcgcaaagctctcctgggtggccaccaactgctggcccatcagggagatctgctggaagctccaccaggccaggcccgcaaaggcgatcagcagcgcaccgatcaaggcccacaacgggccggtgctggcgctcttgaccttgaccaccttggggttgcgcgaacgcaccgaggtggccggggtaggctcgaaatcatcgtcatccccgacatcggcccgcaggctgggaacgttgtcgaagtcgtctttagcatcgttacgcatgaatcaaccctgaatcggtgaggtggcgagcgacgggagtataaaccgcgttcccggcgctctgatcgacccggaacgccgaattcggttcccgaagtgttgcctgttgtgtgcttacttcaacccagggtcctgggccttccaccaactgcagaactcgtcgagggcggtccacaggctgacctttggctcgtaatccagataatgcctggcgcggctgatgtcgagggtgaaatctttgttcatcacttgcatgcccaggcgcgacaacgccggctccggacggcccggccacatcgcacaaaacgcttcgttgagcgccgccacgctgtaggacaaaccgtaggaccgataccgcgtcacctgcggtagctccatctggcgcatcacgtagttcaccacatcccacaccggcactggggtaccgttgctgatgttgtaggccttgcccagcgccgagcccgtggcgagcaggctgctgagcagcgcttcgttgaggttgtgcacactggtgaaatcgaccttgttgaggccgtcgccgacgatggccagacgattcttgcgctgcattttcagcaagcgcgggaagatactcatgtcaccggcgcccgtgacgaagcgcgggcgcagggccaggacttcgaggccgaactcctgggcaccgaacaccttctgctcggctaggtacttggtagcggcataggggtgtttgaagcgtttgggcacttgctcttcggtcaggcccagatgatcgcgcccatcaaaataaatcgacggcgacgacaggtgcaccagccggccgacacgctccttgaggcaggcttcgacgacattttcggtgaccagcacattgccctgatgaaagtcctgatacttgccccacaacccgacagcgccggcgcaatgcaccacggcttcgacatcgcggcagaggtcgcgcaccaggtcggcgtcattcaaatcaccctggataaactcggcgccgcgcctgaccaggtgctccacaccttcggcacgtcgcccgttgacccgcacgtccaggccctgctccagggcgaaacgcgcaaagcgcccgccgatgaagccgcttgcgccggtgaccagaatcttcatgtattaccccatgttctttcgtttttcatcgctgttgccttgacgcgcgtcatcactccaacggcaccaaccattggccacacgcctgggccagatgatcggtcaacaagcccagcagttgcccgccactgcgccaatgatgccagtacaacggcacatcgatgggcttatctggcaataactcgaccaagaggcccttttccagttggtcgcgtacctgcaattccggcaccaacccccagcccaggcccgcttccgtgaggcggataaagccttcggacgatgggcataaatggtgttcgaaaccgccatccacaccgagggatgccaggtagcggtgttgcaggaaatcatccggaccgaacaccaaggccggtgtgcgtgccagttggtcggcgcgcacgccgtcgggaaaatgccgggcaataaaggctgggctcgccaatgcccgataacgcatggcccccagcaacaggctacgcgccccggccaccgggcgctcgctggcgcagatgcaggccgccacctcaccggcacgcatgcgcttgagacctacagtctggtcctccaccaccagatccagcagcagatgctgctcggcgcaaaaaccactgacggcctcggcccaccaggtggcgaggctgtcggcgttcaacgcgatgcgcaggcgttcgggcatgccttcctcatccagggccggcacgtggctttgcaggtcgcgctccagcaagcgcacctgttgcacatggttgagcaggcgacggccaatatcggtgggcgtcggcggcgtggcccgcaccagtaccggctggccgatgcgcgcctccagcagcttgatgcgctgggagatcgccgactgcgacagccccagcacctgggcggcgcgctcgaagcccgcctgttccaccaccgccgccagggcggaaagcaatttatagtcgaacatcagtttctctaatgagcgatcagcaatattggtttttcttatacagcctgcgccctgagaatagccagcatcgcttctctctttacaaggaacctcccatggctggcgaaaccgccctggcaaccctgctgcgcagcatgagcccccatctgaatgacggcgactatgtgttctgcaccctgcccgatcagcgtatccccgccggttgcgaggtaatcggcagcttccgcgaacaggagggcctgaccctgatcgtcgaacgccaacaggcggaacgggctggcctggcctttgattacgtcgccgcgtggatcaccttgaacgtgcattcagccctggaagccgtgggcctgaccgccgccttcgccagcgcgctgggccaggccggcatcagttgcaacgtgattgccggctattaccacgaccacctgttcgtcggccgtgccgatgcccagcgtgccatgcacgtgttgcagcaactggcggcaaacgcggagtagaccctatgtggcagagctatctgaatggtttgctggtcgccctcggcctgatcatggccatcggcacccaaaatgcatttgtgttggcgcaaagcctgcgccgcgaacatcacttgccagtagccgcgctatgcgtggtgtgtgatgccctgctggtggccgccggggtgttcggcctggcgacggtactggcgcagagcccgatactgctggcggtcgcacgctggggcggcgcggctttcctgatctggtacggcgcctgcgcactgcgccgggcctgttcgaaacagagtctggatcagggcggcaacctgcaggtccgctcgctgcgcgcggtgatgctgagcgcactggccgtgaccctgctcaacccgcacgtgtacctggacaccgtgttgctgatcggctcactcggcgcccaacagaccgagcccggcgcctacgtggccggtgccgccagcgcatcgttcctgtggttcgccaccctggcgctcggcgcggcgtggctggcgccctggctggcacgcccggccacctggcgcctgctggacctgttggtggcggtgatgatgttcagcgtggcctatcaattgatcagtgcctgaggaatattccaaaacgctctggaacctctatcccacacagttgttgcgtggttttgccgcacccccggtgctatgatccggaccctgcgccgcaaagagtacaaactccccggcgcttgtttggccgcccgtgatcggccttgcgctcaccgcaactgacctgattaggagatttatcatggctttcgaattgccgccgctgccctacgcacacgatgccctgcagccgcacatctccaaggaaaccttggaataccaccacgacaagcaccacaacacctatgtcgtgaacctgaacaacctggtgccaggcaccgagttcgaaggcaagaccctggaagagatcgtcaagtcctcttcgggcggcatcttcaacaacgctgcccaggtctggaaccacaccttctactggaactgcctggcgccaaacgccggcggccaacctaccggcgcgctggctgaagccatcaacgctgcgttcggttcgttcgacaagttcaaggaagagttcaccaagacgtccgtcggcaccttcggttccggttggggctggctggttaaaaaggctgacggttccctggccctggccagcaccatcggcgccggcaacccgctgaccagcggcgataccccgctgctgacctgcgacgtgtgggaacacgcctactacatcgactaccgcaacgtgcgtccaaagtatgtggaagcgttctggaacctggtcaactggaagttcgtggctgagcagttcgaaggcaagaccttcactgcctaagcactgcttgcagtaaaaaaagcccggcaaatgccgggcttttttgtggttgaaatcaatgctggatagttggaactcactgacatgaatcggccacccagcacgtgagagaaataactctctcagttcatgcaggagagtacgcaatggatccgttatcgatagcgtcagctattacagggattgtgccgctgacaactaaaatcgccgatgtagtaggtaaaggtctggacttggcgggaaaaggcgttgacttatttagcaaggtgctggatttgaatagcaaagacgggaatgagccagcgagcaaaatctgcaacgacgttcatcagaagaatacggctcagattacttttaattcctaaaacatccttcaaccccgcgcgggatccgaaaatgcgttcgctttcgctttcgctcccgcccccttcactcgacagtgtccagattccttcaagccccaatgttcctttgactgccatgcccagattgccaatactcatggcatattgaaggccacccgcatgagacaaggaatgcccctttgaagctggaactcaaaaacagcttgtcggtgaagttgctacgggttgtgctgctgtcggcattgatcgtgggcgtcgcgctaagcgtggcgcagatcgtttttgatgcctacaagacgcgccaggccgtagccggcgatgcccaacgcatcctcgacatgtttcgcgacccctccacccaggccgtctacagcctggaccgcgagatgggcatgcaagtcattgagggcctgtttcaggatgacgccgtgcgcatggcgtccatcggccaccccaacgaaaccatgctggcggaaaaaagccgtgccttgcagcaagcgcccagccgctggttgaccgatctgatccttggccaggaacgcaccttcaccacggcgctggtgggcaaaggcccctacagcgaatattacggcgacctgagcatcaccctcgacaccgcgacttatggccagggctttatcgtcaactcggtgatcatctttatttccggggtgctacgtgccctggccatgggcctggtgctgtacctggtctatcactggctgctgaccaagccgctgtcacggattatcgagcacctgacgtcgatcaaccctgaccgccccagcgagcacaagatcccgcagctcaagggccacgagcgcaacgagttgggtctgtggatcaacaccgccaaccagttgctcgaatccatcgaacgtaacacccacctgcgccacgaagcggaaagcagcctgctgcgcatggcccagtacgacttcctcaccggcctgccgaaccgccagaaactgcaggaacaactggacaagatcctcatcgacgccggccgtcggcaacggcgcgtagcggtgttgtgcgtggggctggatgacttcaagagcgtcaacgagcagttctaccaggccggcgacaaactgctgctggccctggccgaccgcctgcgcgcccacagcggtcgcctcggcgcactcgcccgactgggcggcgaccagttcgccctggtgcaggccgatatcgaccagccttacgaggccgccgagctggcacaaagcatcctggacgacctggaggcagagttcgccctcgaccacgaaggcatccgcctacgcgccaccatcggcatcaccctgttcccggaagacggcgacagcaccgaaaagctgctgcaaaaagccgaacagaccatgaccctggccaagacccgttcgcgcaaccgctatcagttctacatcgccagcgtcgacagcgaaatgcgccggcgccgcgagctggaaaaagacctgcgcgacgccctcagccgcgaccagttccacctggtgtaccaaccgcagatcagctatcgcgatcaccgcgtggtcggtgtggaagcgctgatccgctggcagcatcccgagcatggcctggtaccgccggacctgtttatcccgctggccgagcagaacggcacgattattccgattggcgagtgggtgctggaccaggcctgccggcaattgcgcgaatggcacgacctgggcttcaccgacctgcgcatggcggtcaacttgtccaccgtgcaactgcaccacaccgagttgccacgggtggtcaataacctgatgcagatctaccgcctgccaccgcgcagcctggaactggaagtcaccgaaaccggcctgatggaagacatcagcaccgcagcccagcatctgctgagcctgcgccgttccggggcgttgattgccatcgatgactttggcaccggttactcatccctcagttacctgaaaagcctgcccctggacaagatcaagatcgacaagagctttgtccaggacctgctggatgacgacgacgatgccaccatcgtgcgggccatcatccagttgggcaaaagcctgggcatgcaggtgatcgccgaaggcgtggaaaccgctgagcaagaggcctacatcatctccgagggctgccatgagggtcagggttaccactacagcaaacccttgcaggcccgggagttggcggcatttctgaagcagtcggagcgtaacaacgcggtaattctttgaccggccaaaacgatactgaatatttcccgcgtataaccctttacacaaaatgcaaatctttcgcattatgtcgcagttttttgcgctccccccgcgcgccccatcaacaaccgaagcaggatgttcgccatgattcgtatgcccctggccaccgccagtctgctggccattgccatttctctcgccggctgtggcgaaggtaaagacaaggccgcagcgccacaggcgccgaccccggctgccagcactaccgctccagcggctgccacccctgccggccaggtcgacgaagcggctgccaaggccgtggtcgcgcactacgcagacatggtgttcgcggtctacagcgatgccgagtccactgcaaaaaacctgcagaccgcgatcgacgcgttcctcgccaagccgaacgacgaaaccctgaaagccgcacgtaccgcctggatcgccgcccgcgtcccgtacctgcaaagcgaagtgttccgcttcggcaacaccatcatcgacgactgggaaggccaggtgaacgcatggccgctggacgaaggcctgatcgactacgtcgacaagtcctacgagcatgccctgggtaacccgggcgccaccgccaacatcatcgccaacacccagatccaggtcggcgaagacaaggtcgatgtgaaggacatcactccggaaaaactcgccagcctcaatgagctgggcggttccgaagccaacgtcgccaccggctaccacgccatcgaattcctgctgtggggccaggacctgaacggcaccggcccaggcgccggcaaccgtcctgcgtcggactacctgacgggcgacggtgccaccggtggccacaacgagcgccgccgtacttacctgcgtgccgtgacccaactgctggtcagcgacctggaagaaatggtcggcaactggaaacccaacgtcgaagacaactaccgcgccaccctggaggcagaacctgccaccgatggcctgcgcaaaatgctgttcggcatgggcagcctgtccctgggcgagctggccggtgagcgcatgaaggtttccctggaagccaactcgccggaagacgaacaggactgcttcagcgacaacacccacaactcccacttctacgacgccaagggcatccgcaacgtctacctgggcgagtacacccgcgtcgacggcaccaaaatgaccggcgccagcctgtcgtccctggtggccaaggccgacccggctgccgacaccgccttgaaagcggacctggcggcgaccgaagcgaagatccaggtcatggtcgaccacgccaacaagggtgagcactacgaccagttgatcgcggccggcaacgatgcgggcaaccagatcgtgcgcgacgctatcgccgcactggtcaagcagaccggttcgatcgaagcggcagcgggcaagctgggcatcagcgacctgaacccggataacgctgatcacgagttctgatccaggtgggagggggcttgctcccgatagcagtgtgtcagtgaagcacgtgtttactgacacatcgccatcgggggcaagccccctcccacatttgactgcattgcctcaaccccggtttacatgccccgcaccccaggtagaatggcgcctctgccctatctcgagtgaatttcatggcgttgccgaccctgcgcatcatcggtttcatcatcggcatcttcctgatcactctcgcgatcgccatggtcgtgcccatggccaccctggtgatcttcgaacgcaccagcgacctgccctcgttcctgtgggccagcatgatcacctttctcgccggcctggccctggtgatccccggtcgcccggagcatgtgcacctgcgtccacgggacatgtacctgctgaccgtcaccagttgggtggtggtgtgtgtcttcgccgcgctgccctttctgctgacccagcacatcagctacaccgactccttcttcgaaagcatgtccggcatcaccgccaccggttccacggtgttgagcggcctggacaccctgtcgccgggcatcctgatgtggcgctcgctgctgcactggctcgggggtattggttttatcggcatggcggtagcgatcctgccgctgctgcgcatcggtggtatgcgcctgttccagaccgaatcttcggaccgctcggaaaaagtcatgccccgctcgcacatggtggcgcggctgatcgtggccgcctacgtgggcatcaccatccttggcagcctggcgttctggtgggccggcatgggcctgttcgacgcgatcaaccacgcgatgtcggcgatttccaccggcgggttctccacctcggatgaatccctggcgcactggaaacaaccggcggtgcactgggtagcggtggtggtgatgattctcggcagcctgccgttcaccctctacgtggccacgttgcgcggcaaccgcaaggcactgatcaaggatcagcaggtacaaggtttgctcggtttgctgatcgtgacctggctggtgctcggcacctggtactggtggaccaccaacctgcattggctcgatgccctgcgccatgtggcgctgaacgtgacctcggtggtcaccaccaccggtttcgcgttgggggactacagcctgtggggcaacttctcactgatgctgttcttctacctggggtttattggtggttgctcgggctcgacagccggcgggatcaagatcttccgtttccaggtcgcctacatcctgctcaaggccaacttgaaccagctgattcacccgcgcgcggtgatcaagcagaagtacaacggccaccgcctggatgaagagatcgtgcgttcgatcctgacgttttcgttcttcttcgccatcaccatctgcgccatcgccctggccttgtcgctgctgggcctggactggatgaccgccttgaccggcgccgccagtaccgtatccggtgtcggcccggggctgggggaaaccatcggcccggcaggtaacttcgccagcctgccggatgcggccaaatggatcctgtcattgggcatgctgctcggccgactggagatcattacggtctttgttctgtgtattccggccttttggcgtcactgacagccgaggtttccaacaaccgcgcccggtattcgccgggcgtggcatcgaaccagcgacgaaacgcacggaagaagttactcgggtcggcaaaccccagcaggtaggcgatttccagcaaggtcatgctcggctgcgccaggtattgctcggcgagttcgcgacgggtgtcgtcgagcagggtctggaagctggtgccctcctcctgtagccgccgctgcaaggtgcgttgtgacaggtgcaacgtctgcgccaccacttcacgcttgggctcgccctggggcaacagccggcacagcacttgccgcgccttgtgggtcacgcggctttccgagaaacgcgccaggtattcaccggcaaatcgatcatgcaacagcgccatggcctcgttggccgtgggcagcggcgcttccatgtcggcccgctcgaaaatcaacgcgtcgtagggtgcgttgaactccaggggtgcgtggaaggcttgtttgtagggtgccaggtccgccggctgatcaccttgcagcaccaccttgcgcggctgcagggtgcggccggtgagccagccacacagcgccagggcactggccaacgaggcttcggcgctttgccgggttggcggcaggtgatcgccatgcaccgtcagaatcagcgcatacccttcggggatcagtcggaaactcaggtcggcactttcagcgatgatgcgctggtaacgcaccaggcgcataaaaccctcggcgagggtgttgctggacatcagcgcatagcccgccacatgaaacgacgccgggcgcaccaccttgcccatgttcaggccaatcgccgggttgcccgacagctctaccgcgcgctgccataggcgggtcatgcaatcctgcgggaaccgcgcatcgggatcattcagggcggcgtagtccaggcccagttgcttgaacaaggcgcggcaatccaggccgtccatttccaatgccttgactatccccatcgcccagcttgcagaagttgttcgttcgctcatggcgtcttcttaataaagcaggctcaaacgacagccaggaagccaaggatactaaagtggcatctattgtcactggctgttactactgatcactctagactcaaataagctccccgccgaacatctgttgggcggcataaccaccaaagggccggccactgtggaaaacgtcaagcgattcaatagctttgctgagttctacccctattacctggccgagcacgccaacagtacctgccggcgcctgcatttcatcggtaccacgctggtgatcggcattctggcgtatgccatcggccggggttcgttgggcttgctgatcgccttgccgattgccggctacagctttgcctggatcggccacttcttcttcgaaaagaaccgcccggcgacctttcagcacccgttttatagcctgctgggagactttgtgatgtaccgcgacatgattctgggcaaggtgccgttctagccgaacgaccgtttaaacgatgaaagttcatccatccggcgacataaaaatctttttgtcatttgcggtgctgtatcctgccaaggctttttgagagcgcggaatcacctgcgattgaaaaaacagaccttgcgaggagcgacgacgatgcacgagatacctaatctccccttcccaagcctgcaccctacagagcagccaacaccgcagcaggccagcgacaaacagcctgaggccaaagaagccaaaccagtcgacagcaaaagccaggactgacgccgtaacagaccgtgtggaaagcgcaacgttgagcgctttccacactgcctgaatcaatcgagacgcccatcatgaccgataccctccccgacaccccggataccgccgtactcgacgctgccctgcagatggtcgaggtgtggaaccgcctcagcgcggagaaacaggccgtactgctcaagcgtttcggcacccaggaaaacgcgctggccgccctggtcaccacccaactgctggcccctgcgcgcgcctgacgtctttttgatccgaggtttttgtgttttagcgccctgcgcgaagcaaaccaccggtatcattagcagcctatctttacctgctgcgacagtggacctctcccatgcccgatatccagcgccccatggcggtcacgctgcaagttgtttccatcgtcttgttcaccttcatcggctacctgaatatcggtattcccctggccgtgttgccgggctatgtccacagtgaactgggctacggtgcggtgattgccggcctggtgatcagcgtgcaatacctggccaccctgctgagccgcccgtacgcgggcaagatcatcgacaacctgggcagcaaacgcgccgtgctgatcggcctggtcggctgtggcctgagcggcgtgttcatgctgctcgctgcgtggttctccagcctgccagccttgagcctgggcagcctgttgatcggccgcctggtgctgggcagcgcggaaagcctggtgggctcgggtgccatcggctggggcatcggccgggtcggcgcgcagaacaccgccaaggttatttcctggaacggcatcgccagctacggcgcgctggcggtcggtgctccattgggcgtcgtgttggtgaagagtttcgggctgtggagcatgggggtcagcatcatcctgctggccatcgtcggcctgctgttggcctggaacaaggtcgccgcaccgattgtggccggtgtacgcctgccgttcatgaatgtactgggccgggtcttgccccacggctgcgcgctggcactgggctcgattggatttggcaccatcgcgaccttcatcaccctgtactacaccacccagcactgggataacgcggtgtgggccttgagcttgttcggcgccagctttatcggcgcacggctgttgttcggcaacctgatcaaccggatcggcgggtttcgcgtggcgattgcctgcctgtcagtagaaatctttggtctgctgttgttgtggctcgcgccggatgccagtttggccctggccggtgcggcgttgagcgggtttggcttttccctggtgtttccggccttgggcgtggaagcggtcaacctggtgccggcgtccagccgaggctcggcggtgggcgcttactcgctgttcatcgacctgtcgctgggcatcaccggcccgctcgccggggccgtggcggcggggtttggctttgcgtcgatcttcctgttcgccgccctcgccgccttgggtggcttgctgctcagtgtttacctgtaccgacaagcgccgaaagcccgtgaggcacgcggcgactaaaagtcgaccttgccacgcccggccttgatgctgccgcgcttggtcttggattcgaggcgacgttttttcgagcccagggtcggcttggtcgggcggcgcttcttctccaccttggtagcgctgaggatcaactccaccaggcgctccagcgcatccgcgcggttctgctcctgggtccggtattgttgcgccttgagcaccagcacgccttcactggtgatgcgactgtcgcgcagcgccagcaaccgttccttgtagaagtccggcagcgacgatgcgggaatatcaaagcgcaggtgcaccgcactcgacaccttgttgacgttctgcccaccggcgccctgtgcgcgaatggccgtcagctcgatctcggcgtcgggcaggtggacgttggtggaaatcaccagcatgagcagcaggcacctctaaaggggggaagcccaaggatacgcgaatgcgccctccgccatccctccaagcaacaaacccggcacatggccgggtttgcttgatcacactttacgcttacttgaccgctggcactgccgcatccaaggctcgctgcgcactgcgtttgttcttgattgcgtaacacaccgccataaacgccacccacaccggaatcgcatacaccgacacctggatgcccggaatcatcagcatgatcaccaggatgaacaccacgaacgccaggcacacgaagttgccgtaggggtaccacaacgccttgaacagcggcacctggccagtgcggttcatgtgctggcggaacttgaagtgggagaagctgatcatcgcccagttgatcaccaacgtggccaccaccagggacatcagcagttccagcgcgtgctgcggaatcaggtagttcatcaacaccgccaccagggtgatcgccgccgaggcgaggatggaacgcaccggcacgccgcgcttgtcgatcttggccaatgccttgggcgcatcgccctgctcggccatgcccagcaacatgcggctgttgcagtaagtgccgctgttgtacaccgacagcgccgccgtcaggaccacaaagttgaggatatgcgcggcggtgttgctgcccagcattgagaacacctgcacgaacgggctgccactgtaggcgtcgccagaggcgttgagggtttcaagcaggctgtcccatggcgtcagcgacaacagcaccaccagggcaccgatgtagaaaatcaggatgcggtagatcacctggttgatcgccttcgggatcacggtgcgcggcttgtccgcctcagcagcagtgaaaccgagcatttccaggccgccgaaggagaacatgatgatcgccatggccatcaccaatccgccgacgccgtggggaaagaagccaccgtgttcccacaggttgctgaccgacgcctgcggcccgccgctgccgctgaccagcaaatagctgcccagggcgatcatgccgacgatggccaccaccttgatgatcgcgaaccagaactcggcctcaccgaacactttgacgttggccaggttgatcaggttgatcagcacgaagaacgccgcggccgaaacccaggtcggaatctccggccaccagtaatgcacgtatttgccgacggccgtcagctccgacatacccaccaggatgtacaaaatccagcagttccagcccgacaggaagccggcgaaaccgccccagtacttgtgggcaaagtggctgaaggaaccggcaaccggctcttcgacgatcatttcgccgagctggcgcatgatcatgaaggcaatgaagccgcagatggcataacccaggatcatcgacggcccggctgatttgagcaccccggccgagccgaggaacaggccggtgccgatggcgccaccgagggcgatcaactggatatgtcggtttttcaggccgcgtttcagctcgcctgaagaggaatggggtccactcatgaaaagggtctcacgcaaggtttgagaagattgattgcaggttgctgccttgaattaccgactcaagcagcgccgctcaaaccccagcgcaggcaccaggagtacagcgtctttctaacggtcatgcgtcacctgtttgtttttatctgtgacgaaatcgaacccgtccggctcgtggccaggcggagtgatcagggtgggtacaccctgaggtcttggcctttagcgtggttacgcaagggggtcacagtaaaacgcggcgcattgtacaccgctcgaccgcttggggccgcccgccaaaagcgtgtgcgacgatctgtcaggtaatccttacagcgcaagatcaaccaataatgtcgccatttacgcgtaaattaatcgttacagcatggaaaattcacgttacagccgtgatctgaataaaaaatgacggtcagaaatttcctgcaattcagcgctgccagttgtctgtttttcctcaagaaacaatcaaacaccaaaaacagaacaaaaaatccaaatgaaaccgtgtcaataaaaattttgcattttgaaacactctctcctaggttctttgcacttgcccgcgaagcccgttggcaagccgttctcaaacaccgtcctctaggagatacaccatgcaagcactggaaaacgacctggaaaccgaactgcaactcgacgactggtttgaagcgccgacccatgaggccgccgtagaaatgatgcaagccgacgctgttgtgccatttggcacagcgatgtggcccttctaaaaaccggcacgctcccggcaggtgccgtgcacggcacctgctcccttacccaaggcacagaaggacgcacgtcatggacaaggcccgcgccgtcgaacattttctctactacctcgcgcaccacccggccctcaatggcctgagccgccccaccgtgctgctgggccataccaagcgctacgacgccatcgcccagacgatcacccagggcagcgccgcccctttcaacttccaggtgcagcgcctggacctggccgccagcgacaccctggctcaggccatcgaagcctgcgacctgtacctgtttctctacgactcctccaccttgcccaaccctcgcgccgaaggcccggactttatccgtgccctgcaaggcgtgatggccgaacactggaaaaaatccctgctgttcaaggattatggcgactatttctatgacaccttcagcgtcgagccccaacgcattgccgacctcaatgccacgctgatccggcgcatgtcccaggccaacgtgctgagctttaccgacaaacatggctcacggctggaagcgccgatgagcagcatcaagaagtggaccaatatcaatggggtcggcaaccacgatctggccccgggcgagatcgccacccacagtgaggctatcaatggtcaggtgcggtttgtcggcacctttctcagcaccatcccgtttgcgcgcaaatatggtgtgctgcaatcgccgctggagttgtggatcgagaactcgaccatctgcagcgtggccagtgaagtgccggggttggccgatgatttcaacaagtacctgaatgccaacccgtcgaaccggcgtgtggaagagttggggattggtaccaatgaaggggtgaaggatctgtatgcgcgcaacgccgggttcgaggagcgccattgcgggttgcacctgggcttgggcggtgggcagaaaggcagccatcacctggatttgatctttgccagtggggtgttggcgctggatgacaagccggtgtttgatggggcctttgcgttctgagcaaagcgttaactaacgctgaaaatctgaatgtgggagggggcttgcccccgatggcagtcggtcagttgatgtgtgtggtggctgccacaccgttatcgggggcaagccccctcccacattttgaacgtattccaaggcaaaaaaaaacgccaacccgagggttggcgttttttatgcggcgatcaaatcactgcggcttcttgcggccaaaaccaggacgctggccggaaccggccggggcgccacggcgcttgccagacggctcgtccgcgaccagtttcgggccgggacgcttgttagcggcaggcttggctggacgcttggtgctggcgttgtcggccgggcgatccgcttcaccccggttgctgcggccacccgatggggcaggacgcggcgcacgtggcgcacgctcgccttcctgacgcgacggcgcggttgggcggcgctcaccttcgatctgcggctcacgggaaatacgaccgccggtcgccggagcattcaacgccgggcgcagggtgcgggcaacccgctcggtgcgcgccaccgggcgcgacgatttacgctgcatacgctcaagcttgtctttgctcttggcgttcatctgcggcatcgccaccggcgtcaggccgacttcggcactgaggatgtcgacttcgtactggctcatttcgcgccagcggcccatcggcaggtcggagttgaggaataccgggccgaaacgcacgcgcttcaggcggctgaccaccaggccctgggattcccacaggcgacgcacttcacggttacggccttccatcaccacgcagtggtaccagtggttgaaaccttcaccacctggcgcctgcttgatgtcggtgaacttggccgggccatcttccagcaccacgcccgccttgaggcgctcgatcatctcgtcgtcgacttcgccgcgtacacgcacggcgtactcgcggtccatctcgtaggacgggtgcatcaggcggttggccaattcaccgtcggtggtgaacatcagcaagccagtagtgttgatatccaggcgaccgatgttgatccagcggccttctttgggcttgggcatcttgtcgaacacggtcggacggccttccgggtcgtcgcgggtgcagatctcgccatcgggcttgttgtacatgatcacgcggcgcaccgattcggcggcctcttcacgcttgatgaccttgccatcgatggtgattgcgtcgtgcaggtcgacgcgctggccgagggtagcctcgacgccgttgaccttgatgcgcttctgggtgatccaggcttcgacgtcgcggcgcgagcccacgccgatacgcgccagcaccttttgcagtttttcgcctgctgggccgatttcctggctgtcgttctggtctttgtcgttcatcttaagcacctcccggtgggtcgattcaggcgtggcctgaagagtgttgaaagcggggctttggccgaatagctcggcaaagggtcgcgaatcatacgcgcatggcgcgcgttgcgcatcagagactagtcgattagtggccggcaatcggtttttccgccgaccggtgggccatgtgggatccgggtcaatcttcgaactggcgacgctcggcctcgatagcttcggccagggcccgggcttcgtcttcttcgtcgctcagcggcggctgttcgagggcggcgacggcggccaggagtttttcacgggcttcggcgacgccgaggatgtcttcttcaggttcgggctcaggttcagggtcaacggtttcctggggttctgcctcagtcgcaccatcgcgcagcaagtcatcaaagtcggtcttgatgccctgctccatgtcgtccagttccagcagcaaggtgtggaagctggtttcgtccttcggttcttccggctctgctgtcgcatcggcgagctcctgcaggctggccggcaccggggcatcgtcgaagtcgagcaccggctccgcttccatttcgcgcaattcggccagcggcggcaagtcgtcgaggtttttcaggttgaaatggtcgaggaacaccttggtggttgcaaacatcgccggtttgccgggcacgtcacggtaaccgacgatgcggatccactcgcgctccagcaacgtcttgacgatatggctgttgaccgccacgccccgcacgtcctcgatctcaccccgggtgatcggctggcgataggcgatcagcgccatggtctccagcatcgcccgagaataacgctgggggcgctcttcccacaggcgtccgacccaaggggaaaatttctcacgaatctgcaggcgataacccgacgccacttcgcgtaattcaaaagcacggccgtcgcaggatttgcgcagaatctccagcgccttcttgaacaccggcggctcgggacgttcggcctcttcaaagagctcgaacaaacgctccagggattgcggtttgcccgacgccagtaggaaagcttccagcagcggtgccagttcgcggggttcagtcagattcatcgattcagctctttattcggctcgcgcccgcacgtggatagccgcaaaaggctcattctggaccagctcgaccaacgactccttgaccagttcgaggatcgccataaacgtcaccaccacccccaggcgcccttcttcggcggtgaacagctcgacaaacggcacgaagccgccgcccttgaggcgctccagcacgtcgctcatgcgctcgcgggtggacagcgcctcgcggctgacctggtgactttcaaacatatcgccccggcgcagcacctcggccatggacatcagcaattcttccaggctcacgtccggcaacagtttgcgcgcacgggcctcgggggcatccagcttgggcaccacaacgtcgcggcccacccggctcaggccatcgatgccttcggcggcggccttgaagcgttcgtactcctgcaggcgtcggatcagttcagcgcgtgggtcgtcttcttcggcctccaccgtctccgagcgcggcagcagcatgcgcgacttgatctcggcgagcatggcagccatcaccaggtactcggcggccagctccaggcgcaccgactgcatcagctccacatagcccatgtactggcgcgtgatttccgccaccggaatatcgaggatgttgatgttctgcttgcggatcaaatacagcagcaaatccagcgggccttcgaaagcctccaggaagacttccagcgcgtccggcggaatgtacagatccaggggcatttccatgaccgcctggccgtacaccatggcaaacggcagttcctgctgggcgcccgcctggctgtcgacggtttccacggctgacattcaggcctcgaccatgaacggcgccgggtcgccgcaacccacgcggatcacttcgggttcgccgtcggccaggttgatcacggtggaagctttgccgccgccgaaaccgccgtcgatgatcaggtccacctgcttttccaggagctgacgcatttcatacggatcttccaggggatgggtgtcgccgggcatgatcaacgacacgctcatcaacggctcacccagttcttcaagcagcgccagggcaatgggatgctctggcacccgcaggccaatggtgcgcttcttcgggtgcagcagcaggcgcggcacttcgcgggtggcattcagaataaaggtgtagggccccggcgtgtgagccttgagcaggcggaaggtgccggtgtcgaccttggcgaacagccccaactgggacaggtcactgcagatcagtgcgaagttgtgcttgtcgtccaactggcgcaggcgtcttacccgctcgacggcgcccttgtcgccgatctggcaaccaatggcgtaggacgaatcggttgggtagatcaccacgccgccggcgcggatgatctcgacggcctgtttgatcaggcgcgcctgggggttttccggatgaatctggaagaattgactcacgtgttctacctgttcagacggtggcaataatggggtcatgcttgaatcgcccccacaagagcggcaaatcttccgggacggggcgatactcgccgatctcggaccagccgcctgggccatgaaaatcactgccggcactgaccagcagaccaaattcgcgggcaagaatcgccaggctgccgacctgctcggcgggttgatgcccgttgaccacttcgattgcgtggccgcccgctccaatatagtcggcaatcagcttgcggcgcttgctgcgggtgaaatcgtagtgccagggatgggccaggctgacccaggccccggaggcccgcagggtctcgacggtgtcctccagggtcggccagtgttgcttcacatcacccaacttgccggcgcccagccatttgcggaacgcttcggcgcggtcctttacaaaaccttcacgtaccatccagtcggcaaagtgcggccgcgcgggtgcgttgccgctgtcacccagttcctgctggatggcgcgggcgccttccagggcaccggacatgcctttaaggccgagcttgcggcttatttcttcggaccgcagccagcggccatcgtgcaactgggcaatggcggcgaccaaaggcggggctttttgatcaaagccgtagccgagtacatgaatggtggcgccaccccaggtgcaggacaactccacaccgttgaccagctgcatgcccaacgcatgcgcggcttcgcgggcttcgtcgaggccttcgagggtgtcgtggtcggtcaacgccaggactcgcacgcctttttcaaacgcacgcgcaaccagtaacgcaggcgccagggcgccgtcggaggccgtgctgtggcagtgcaaatcaacattcacggggatgtgtaacctcaagtcagctggcgctttcgctaccaaggatgtttgttattatgccgccacatccagcttctggctcttactgtgaaacaattcatcgacttcatcccgctgttgctgtttttcatcgttaccaagctcgaccccagggtcatcgaaatcgccggtcatgcgttctcgttcgggggcatctacagcgccaccgccgtactgatcatcagttctatcgtcgtctacggcgccatcttcatctcccagcgcaagctggaaaaaagccaatggctcaccctggtcgcgtgcctggtattcggcggcctgaccctggccttccacagcgaaaccttcctcaaatggaaagcgccggtggtgaactggctgttcgccctggtgtttatcggcagccacttcatcggtgaccgcctgttgatcaagcggatcatgggccacgcgctgaccctgccggatccggtgtggacacgcctgaacgttgcgtggatcgtgttcttcctgttctgcggcgccgccaacctgttcgtggcctttaccttccaggactactgggtcgacttcaaggtcttcggcagcctggccatgaccgtgctgttcctggtcggccagggtatctacctgtcgcgccacctgcatgacgtcgcccctaccaccccgaaaaccgaggattgacatgctctacgccatcattgccaccgacgttgccgactcgctggaaaaacgcctgagcgtgcgcccggcccatgtcgagcgcctcaagcagttgcaggccgaaggccgtatcgtgctggcgggtccacaccctgcggtagacagcaacgacccaggcgacgccggtttcaccggtagcctgatcgtcgccgagtttgcctccctggccgatgcccaggcctgggccaaggctgatccttatgtagctgccggcgtttacgccgacgtcgtgatcaagccgttcaagcaagtcctgccttgataacggccacgccgaacctaatcggttcggcgcgctcctaattgctcattattctcggtaacctgccgacaacgttctgaatattcgtgtggaatcaggagttccgatgcgcttacgtcagttgtgtctgttggcagtggtaatgatcggggctacggcccacgctgaagaaacctcgaacaccggcagttccacgcctctgtccttgagtgccggcgcccagatcaccgagttgcagcagcggttgaaagaaagcgaacgccagcgtgaagaattgagcaagcaactgcaaaacgtagatgctacccgcgaaagcgcccaactgagtcgccttcgccaagagaaccaacgcctggcccagcaactcaaagaaacacagggcggcgccttgacccgatggctgaccgagcagcaacaatggttcgtcaccggtggggccgtggcgctgatcgccttgctgtgcgggatcttcgccagcggtgggcaccgtcgccgtcgacaatggctaaattgagtgagtcatgagcgagctgttactgatagatgatgaccaggagctctgcgagctgctgaccagttggttgagccaggaaggcttccaggtacgcgcctgccatgacggtttgagcgcccgcaaagccttggccgacagtgccccggccgcagtggtactcgacgtgatgctgcccgacggcagcggcctggaactgctaaagcaattacgcaacgaccacccggagctgccggtgctgatgctgtcggcgcgcggcgaaccactggaccgcattctcggcctggaactgggtgccgacgattacctggccaagccctgcgacccacgcgagctcaccgcacgcctgcgcgccgtgctgcgccgcagccacccggccgccgtgtccacccagctcgaattgggcgacctgtgtttcagcccggtgcgcggcgtggtcagcatcgatgaacaggaattttccctcaccgtctccgaaagccgcctgctggaagccttgctacgccagcccggcgagcccttggacaaacaggaactggcgcagatcgccctgggccgcaaactgaccctttacgatcgcagcctggacatgcacgtgagcaacctgcgcaaaaagatcggcccgcacccggacggccgaccacgcatcgtggcgttgcgcagtcggggctactattacagcctttgaagcagctatcagttgccgccttccccttaccaaacctttaccctctcctgacggcggctgaccttgatctccgtaatctactcacatccggactcaccggaatagagacaggagaatcaccatgcgcaagacccttatcgctttgatgttcgccgctgccctgccgaccgttgccatggcggcaatgcccgaaggcccaggcccgatgggcggccccgaaggccatatgatgggtggcccgggtcacgacggcgaacacggtccgcgtggcaaaggcggccccttcagccaactggacctgagcaaggaacagcgccagcagatcggcaaactgatgggcgaccaatggcacgctcgcaaggacctgaccagaaagtacctggacaagctcccggctgctgaccagaaggccatgcaggacgaaatcgccgccggcaagcagaaaacccaggcggatatccgtgcgctgctcaagccagaccagcagaagaaattcgacgagatcgtcaagcagcaggaacagcgccgcgccgaatggaaggaattccaggcctggaaagcgcaacagccgcaaaaagcgcaataatgccctcgcgttaacgctcccagcccagtggcccccgccactgggcttttcctgcttgagggtttcctgtgcgttcattgttctggcgcatcctggccagtttctggctggccatcgccttggttgccgggttgtcgatcctgcttgggcatatgctcaatcaagatgcctggattctcagccgtcaccctggcctcaacaacctggccgaagagtggacccaactctacgaaacccagggtgaggacgctgcccaggagttgctgcaacagcgcaaacgccagtaccacatcgacgtgcaggtgctgaacgaaagcggcgagccggtggtgcgcggcaccttcccacgccgcgccgccgccttcgaagcccgccagaacgatagcaaggacggccacctgccctggcgccgcctgaccgctgaatacaccagtgagaagaccggcgacacttacctgttgatctaccgcatcccgcacccggaactggacgaatggcatcgcagcagcctgacatggcctttgagcgcattggtcatcgccttggtggtgctgaccctgttcagcctgttcgtcacactgtccatcacgcgccccttaagccgactgcgcggcgcagtgcatgaccttgggcaagccacctaccaacaaaacagcctggcgcaactggccaaccggcgcgatgagttcggcgtactggccaccgacttcaaccgcatgggcgcgcgcctgcaaagcctgatcggcagccagcgccagttgctgcgcgacgtgtcccacgaactgcgctcgcccctggcccgcctgcgcatcgccctggccttggctgaacgcgccagccccgaagaacgcgaaagactctggcctcgcctgacccgcgaatgtgatcgcctggaggctctgatcagcgagattctggtactggcccgcgtcgatgccgataacgccagcgccgaagaaatcgacctcaacccgttgctcaagaccctgcaaaaagacgcacagctcagcgcgccggatcaggtggtgcagctcaccaccgacaccgaactgcacctcaaggggtggccgaccatgatcgaacgggcagtggataacctgctgcgcaacgcccagcgcttcaacccgccgggccagccgatcgagctacacgcccaccttcacggcgagcatattgtgatcagcgtgcgcgaccacggccccggcgttgacgccgaacacctgagccaattgggcgaaccgttctatcgcgccccaggccagaccgcacaaggccacggtctgggcctggcgattgcccgtcgcgccgccgagcgccatggcggcaacctgttcctggccaatcatgcccaaggcggttttatcgccagtatcgatctgccgctggaacctgggattgtcacaccggcctgatcatcttctatagtggcccttctcttacggagggccgttgatgactgacctgctgactcccatccaagccgcactcgatctaccgcgcacgccgctgaccagcaccgaagccggcgccctgccctcggcctttgccgtcaccgacctggcggttgccagtatcggtgccgccggccaggccgtggcccagttgatcctgcaacagaccgggcgactgcccggcgtgagtgtggaccggcgactggcgtccttctggttctcgtcatcgattcgcccgataggctggaaaacgccaccgctgtgggacccggtggccggtgactacgcctgcgccgatggctggattcgcctgcacaccaacgcgccccatcaccgcgccgccgctgaacgggtactgggcaaggtggctgatcgcatcgcgatggccggcaaggtagccaattggaatgccgccgaactggaacaggcgattgtcgatgaaggcggttgtgccgcgcagatgcgtacctggcaagcctggcaaacccaccctcagggcctggccgtcaatgccgaggcactggtgcagcgccagaccttggcaacctccgtcgacaaaccctggctcggctcggtggcgcgtccactggcgggcctcaaggtattggacctgacccgcgtgctggccggcccggtggccagccgtttcctcgcagggctgggtgcggatgtattgcgcatcgactcaccgacctggaacgagcccggcgtagtgccggaaatgaccctgggcaaacgctgcgcccgcctggacttgaagagcgcccaaggccgcctggttttcgaaagcctgctcaaggacgccgacattgtgttccacggctaccgcgccgacgccctggaacaactgggctacagtgccagtgaactgcaaacccgcgcccccggcctgatcgacgtgagcctcaacgcctacggttggagcggcccgtggcgcaaccgccggggtttcgacagcctggtgcagatgagcagcgggattgccgccgcaggcatggcctggaaacacgcggacaaaccggtgccgctgccgttgcaggcactggatcacgccaccgggtatttgatggcggccagtgcgattcgggcattgagcgaacggttgaaaaccggccgtggcggttcggcgcggttgtcgttggcgcgtacggcgaagttgctggtggacgccgggcaggtgccggagcagccggcattgcgggccgagcaaccgagcgatcaaggcctggtagtggaacagacggcctggggccaggcgcatcgattgttgccgccggtgactatcagcggcacgccgttgcagtgggatctgccggctggggaactgggttcacaccgagcgcagtggtgactcgactatcgccatcgggggcaagccccctcccacatttttggatgttgttcacaaatcaaactgtgggagggggcttgcccccgatgaggcccgtaccgtcactatcaatccacccgttgcaacgaagtccacaaatgctgcgccgcatacgcccgcaacggccgccacgcctcggcccgcgccagcaactgccgcgccgacaccggcccgccctccaacgccgccagcgcattgatcaagccgatatcccccgacgcaaacgcatccgtctcgcgcatctggcgcatggcgatgtattgcgcggtccagtcgccaatccccggcaacgccaccagccgggccacaccatccttgaggctggccttggcttcgaacagctgagggtcatccagcaacgcctgcgcgacgccggacaaggtccgtccacgcgccttcggcatgcccagggtggccaggtccgctgccgccaatacttcggccgaggggaacacatgggtgataccgacgtacggcgtctccagcggctggccatattgcgccaccagcttgcccgctaggcgaatcgccgccaccacggtaatctgctggcccagcaccgcacgaatcgccagttccaggccatcccaggtgcccggcacgcgcaggcccggacgggccgcgaccaactgcgccatcaagggatccgtcgccaattgcgggttgatcaactggggctgcgcatccagatcgaacatcgtgcgcaggcgccgttcgatctcaggcaacgccgccgggtctggaaaacccacctcgacgtctagccaatcgccatcccccagtgccacgctgatccagccgtgctgcccgccgaggctgatactgcgccggtacacccccgcctcgaccgtctccatcccgccgatcgcccgcgccgacagaaaccccaccatcgccgcccaatcataaggcggctgatacgccagtctcacaacgacaacaccccgctgtacagcccatacgccgccagccccgcgccggtgatcacacagctgaaaatgcctttttccatgtgggtaaacaagggctggcgctgctcacgcttggcgagggcaaacaggatcacccccggtgcatacaacagcgccgacagcagcaggtacttcaagcccccggcatacagcagccacacggcgtagccgagagcgatcaggcccaccagcaagtccttcaaacgctggccgtgggcgtcttcgtaggtttcgccgcgcccgctcaacagcacggcatacgcggccgaccacaggtagggcaccaggatcatcgatgaggccaggtaaatcagggtcgtgtaggtgctgtgggaaaacagcgtgatcaccaggaagagctggatcatcacattggtcagccacaacgcgttgaccggcacttgattggcgttttccttcttcaggaacgccggcatggtcttgtcatgggccgtggcgtagaggatttccgcacaaagcagcgcccaggacagcaaggcaccgaccagtgacaccgccaggccgatgctgatcgccatcgccccccaggggccgacgatatgttccagcacgccggccagggacgggttttgcaattgcgcgagttccggctggctcatgatgcccagggacagcacattcaccagcaccaacagggccagcacgccgagaaaaccgatcagcgtggcgcggcccacgtccgagcgtttctcggcccgcgccgagtacacgctggcaccctcgatgccgataaacacaaacacggtgaccagcatcatgttgcgcacctggtccaccacgttgcccatattcgggttgcccaggccccagatatcgcgagtgaagatatccgccttgaacgccacggcggcgatcacgataaacatcagcagcggcacgatcttcgccaccgtggtgatctggttgatgaacgccgcctccttgatcccgcgcaacaccaggaaatgcacggcccacagcagcaacgaggcacagccgatcgccaccggcgtgttgccctggccgaacaccggaaaaaaatagcctagggtactgaacagcaacacgaagtaaccgacgttgcccatccacgcgctgatccagtagccccaggccgacgagaaccccatgtagtcaccgaacccggccttggcgtaggcatacacgcccgaatccagttcgggcttgcgattggccagggtctggaacacgaaggccagggtcagcatgccgaccgcggtgattgcccaaccgattaacacggcccccacctcggcgcgtgcggccatgttttgtggcaaggaaaaaatcccgccgccgatcatcgagcccaccaccagggcaatcagggcaccaagtcgcagtttctgggccggttgagacatgaacactcctaaatgaacaacaacttgagctgacaacggtgcactcggctaattaactcagcgagtgtagcgtttattagtgaaggcgataaaaccaggaggctcataacgcaatcgcatgtcaggcattcgagtttagtcttatttagaatttaaataccggattgtctgaccgttcgcgaaacgcctttcgaaatgtttgcatattcaagaatacggtctagcttaaaacctccatagcgctgactaaatgattaaccaaaaggaaagaatggctctgcgtcaatactttccgaggattcttatcgcccacgagtttccagcctaagtcattaattcacaatggaatgtgccaatgaagtgatctgagtcagctgtttgattagcgcacggatttattctgtggtctctcttctcctgcattggagttatgcgatgtctgaatctcccggaaaacttcgactgggcgcactggttgcacttgtcgtgggctcgatgattggcggcgggatcttttcactgccgcaaaacatggccgccagtgccgatgtcggcgcggtattgattggttgggtgattaccgccatcggcatgttgaccctcgcctttgtgttccagaccctcgccaaccgcaagcccgacctcgacggtggcgtatacgcctacgccaaggccggtttcggcgactacatgggtttctcgtccgcctggggttactggatcagtgcgtggctgggcaatgtcggttacttcgtgttgctgttcagcaccctgggttacttcttccccattttcggcgaaggcaacacgccggctgcggtgatcggcgcctcggtgctgctgtgggccgtgcacttcctggtactgcgcgggatcaaggaagcggcgttcatcaacctggtgaccaccgtcgccaaggtcgtgccgctggtgctgttcgtgctgattgcgctgttcgccttcaagctggagatcttcaccgctgacatctggggcgtgaaaaaccccgacctgggcagtgtaatgaaccaggtgcgcaacatgatgctggtcaccgtctgggtgttcatcggcatcgaaggcgcgagcatcttctcgtcccgtgcggaaaaacgctccgacgtcggcaaggccaccgtgatcggctttatcaccgtgctgctgttcctgatgctggtgaacgtgctgtccctggggatcatgacccagccggagctcgccaagttgcagaacccgtcgatggccgccgtgctggagcatgtggtgggccactggggcgcggtgctgatcagcgtcggcttgatcatctcgctgctgggggcgctgctgtcgtgggtgctgctgtgtgcggagatcatgttcgccgccgccaaggaccacaccatgccggagttcctgcgcaaggagaacgccaaccacgtaccggccaacgccctgtggctgaccaacgccatggtgcagatattcctggtgatcacgctgttttccgccagcacctacctgtcgctgatctacctcgccacctcgatgatcctggtgccctacctgtggtcggcggcctacgcgttgctgctggcggtgcgcggcgagacctatgaaaacgccctgcgcgaacgcaagaaagacctgttcatcggcgccatcgccctgatctacgcggtctggctgctctacgccggcggcaccaaatacctgctgctctccgccctgctctacgcccccggcgcgatcctgttcgccaaggccaagcatgaactgggcaaaccgattttcaccaacgtcgagaagctgattttcgccgcagtagtcattggcgccctggtggcggcctatgggctctacgacggcttcctgactctgtaattctgactggaggatctgtaatgaccacggaaaaagtgaagtacggcgtacattccgaagccggcaaactgcgcaaagtcatggtgtgctccccaggtttggcccaccagcggctgacccccaacaactgcgatgaactgctgttcgatgacgtgctgtgggtggcccaggccaagcgcgaccacttcgacttcgtgaccaagatgcgcgagcgggacattgatgtgctggaaatgcacaacctgctcaccgacatcgtcgccatccccgaagcgctggactggatcctgaagcgcaagatcaccgccaacacggttggcctgggcctggtcgacgaagtcagctcctggctgcgcagcctggagccacgcaaggccgccgagttcctcatcggtggcgtctcggccgatgacctgccgagccaattcggcggcaagaccatcgaaatgttccgtgacttcctcggccatgccagcttcatcctgccgccgctgcccaacacccagttcacccgcgacaccacctgctggatctacggcggcgtgacgctcaacccgatgtactggccggcgcgacgccaggaaaccctgctggcctcggccatctacaagttccaccccgagttcaccaacgccgacttccagatctggtacggcgaccccgaccaggagcacggcgccgccaccctggaaggcggcgacgtgatgccgattggcaacggcgtggtcttgatcggcatgggcgagcgctcgtcccaccaggccatcggtcaactggcgcgcaacctgttcaagaacaaggcggtggaacgcgtgatcgtcgccggcctgccgaaatcccgcgcggcgatgcacctggacaccgtgttcagcttctgcgaccgcgacctggtgaccatcttccccgaagtggtcaaccagatcgtgcccttcaccctgcgcccggatgaaagcaagccacacggcatcgacatccaacgcgagaaaaccaacttcctcgaaaccgtcgccgcagccctcaacctcaaggcactgcgtgtggtcgagaccggcggcaacagcttcgccgccgagcgcgaacaatgggatgacggcaacaacgtggtggcggtagagcctggcgtggtgatcggttacgaccgcaacacctacaccaacaccctgctacgcaaggccggggtggaagtcatcactatcagcgccggtgagctcggccggggccgtggcggcggccactgcatgacctgcccgatcatccgcgacccaatcgactactaaggagactccatcatggctttcaacatgcgcaaccgcagcctgctgtcgctgatgcaccacaccacccgcgagctgcactacctgctggacctgtcccgcgacctcaagcgcgccaaatacaccggcaccgagcgtccgcacctgcaaggcaagaacatcgcgctgatcttcgaaaaaacctcgacccgcacccgctgcgccttcgaagtcgccgcccatgaccagggcgcccacgtcacctacatcgacccggtgtcgtcgcagatcggccacaaggaaagcatgaaagacaccgcccgcgtgctcgggcgcatgtttgatgcgatcgagtaccgtggcttcgagcaggaaatcgtcgaagagctggccaagttcgccggcgtgccggtgttcaacggcctcaccgccgaattccacccgacccaaatgatcgccgacaccctgaccatgcgcgagcacagcgacaagccgctgcatgacatcagctacgcctacctgggggatgcgcgctacaacatgggcaattcgctgctgatgatcggcgccaagctgggcatggacgtgcgcatcggcgcacccaaagcgctgtggccgcacgcggacttcatcaagcaatgccaggcgtttgccgaagaaagcggcgcacgcatcaccatcaccgaagacccgaaggaagcagtgaaaggcgtggacttcatccacaccgatatctgggtgtccatgggcgagccggtggaagcgtgggacgagcgcatcgagcaactgctgccgtaccaggtcaacgccaagatgatgaaagcctcgggcaacccacgggtgaaattcatgcactgcctgccggcgttccacaacagcgaaaccaaggtgggcaaggacatcgccgcgcggtacccgaacctggccaatggcgtggaagtgaccgaagaggtgttcgagtcgccggccaacatcgcgtttgagcaggcggaaaaccgcatgcataccatcaaggcgattctggtgtcggcactcgcagatatctaaaaaatgtgggagggggcttgcccccgatagcggtacatcagtaataaaagtgctggctgaaacaccgcaatcgggggcaagccccctcccacactaaccgcgttcacaacgatgaatttcatcagaaggacattctttatgcgcatcgtcgtagccctgggcggcaacgccctgctccgccgtggtgaacccatgaccgcggacaaccaacgcgccaatatccgcatcgccaccgaacagatcgccaagatccatgccggcaacgagctggtgatcgcccacggcaatggcccgcaagtcggcctgctgtcgttgcaggcagcggcctacacccaggtctcgccatacccgctggacgtgctcggcgccgaaaccgaaggcatgatcggctacatcatcgaacaggaactgggcaacctgctggacttcgaagtgcccttcgctaccctgctcacccaagtggaagtggacgccaaggaccccgccttcaagaacccgaccaagcccatcggcccggtgtattccaaggccgaagcggagaaactcgccgccgaaaaaggctgggccattgcgccggatggtgacaagtaccgtcgcgtggtcgccagcccacggcccaaacgcatctttgaaatccgcccgatcaagtggctgctggaaaaaagcgccatcgtcatctgcgccggcggcggtggcatcccgacgatgtatggggaagacggcaagctgcgcgggattgaggccgtgatcgacaaagacttgtgttcttcgttgctggcctcgcaactggaggccgatctgctggtgatcgccaccgacgtcaacgcggccttcatcgactacggcaagcctacccagaaggccatcggccaggcccaccccgacgaaatggaaaagctcggcttcgccgccggttccatggggcccaaggtccaagcggcctgcgagttcgcccgcaagactggcaaaaccgccgtcatcggttcactctcggacatcgaagccatcgtccagggcagtgccggtacacgcatcagtacggcaacacctggcatcacctatctgtgaagtagaggagagacgcctatggccacctttgaacccggtcacttacatgttgaacgtcacgcactgaatgcccaggactacagctacaacctgtgcatcgactacgaagtcagccaggacccaaaggaaggcaagggcatgctgttcaagctgcatggctcggtgcagggcaaggacctcaaggaagagttcttcctgcccaaggaccaggcattcgactttgcgcggcatgcgatgaacatcgcgcagaagtatgggatgccgaaagtcgcggtgttgaacggctcgatgcacaagcagtacgacttgatgttcgaggatgtgcggcatcaactggatgtgaaggccggggacccgatcaagccggaacacctggaataactggcacaactctgctccaactgtgggagggggcttgcccccgatagcggtgcatcagttacaaattggctgactgacacaccactatcgggggcaagcccctcccacattttgatctccaccctctgcaaggcatacttgctgcctctcgcgtcccagaattgtcagcagccccatgcgtatccacgtcagcttcatcgaccgcgtcggcatcacccaggaagtcctggccctgctcggtgggcgcaatctcaacctggatgcggtggagatggtgccacccaacgtctacatcgacgcaccgaccctcagcgccgaggtgctcgaagagctgcgcgatgcgctgttcagcgtgcacggcgtgcaggcggtgaccgtggtggacatcctccccggccaacgccgccacctgcaactcgacgccctgctggccgccatgaccgacccggtgctggcgctggacagcgcgggcaagatcctgctggccaacccggcgctgatcgccctgtacggccgcgaaccggccggcgaaagcatcagcgagctgtttaatgacccggcgctgctcgacaccttgctggaacacggctttcgcttgccgctgcgcgagatcagcgtcaacggccagaccctgctgctggacgccacgccgatcaccgacgcgggcgccttgctcaccctgtatcaacccaaccgcatcggcgaacaactgtcggcgctgcaccatgaccatgccgaagggtttgatgcgctgcttggcgagtccccggtgatccgcaccctcaaggcgcgtgcgcagcgggtggcggcgctggatgcgccgctgttgatccagggcgagacgggcaccggcaaagaactggtggcgcgtgcctgccacgccatcagtgcccgccacagtgcgccgttcctggccttgaactgcgcggcgctgccggaaaacctcgccgaaagcgaactgttcggctatgcgcccggcgcctttaccggcgcgcaacgcggtggcaagccaggcctgatggaactggctaaccagggcacggtgttcctcgatgaaatcggcgagatgtcgccgtacctgcaggccaagctgctgcgttttctcaatgacggcagcttccgacgcgttggcggcgaccgtgaagtgaaggtcaatgtgcgcatcctcagcgccacccaccgcgacctggagaagatggtcagcgaaggcaccttccgcgaagacctgttctaccgcctcaacgtgctcaacgtcgaagtgccgcccctgcgtgcacgcggccaggacatcctgctgctcgcccgctatttcatgcagcaggcctgtgcgcagatccagcgtccggtttgccgcctggcgcccggcacttacccggcgctgctgggcaaccgctggccaggcaacgtgcggcagttgcagaacgtgatcttccgcgccgccgccatctgcgaaagcagcctggtggatatcggcgacctcgacatcgccggcacctcggtggcgcgccagagcgacggcgaaatcgacagcctggaacaggcggtggaagacttcgagcgcaacctgctggaaacgctctacaccagctacccctcgactcgacaactggccagccggttgcagacgtcccatacggcgattgcccatcgtctgcgtaagtacggcattcccaacaagccttgagtgacatggttaaaaatgtcggagcgcattgcaatgttggtctgagaacgacatcgcgtgtactgaaagcgctacagcgtaacgatatcgctacaatcctgttttttgcgcgccatgcaaggctttgatccacataggctttttttcacaggcccaactgtagcgaaatcgctacaggcaaaatgcatatcgtcataaccaattttatcaagtcattgagttatataggattaatgacgttggccgcgatattgctaagcaactccccattattccaatcccgtccaccagacgaatctggccctgaggagtttccatgagcgagttgcgtttcactgaagatcacgaatggctgcgcgccgaagctgacggcagcgtcaccgtgggtatcaccgctttcgcgcagaacgcgctgggtgatgtggttttcgtgcaactgccggagttgcaggcctacgacaagggcgccgaggcgtccaccgtggaatcggtcaaggccgccagcggcgtgtacatgccgctggacggggaagtcctcgaagtgaacgacaagctcgacggcagcccggaactggtcaacgaagacccgatgggcgaaggttggttcttccgctttaaaccggccgatgccggggcagtcgctaaactgttggatcaggacgcgtacgatcgcctgatcaaagccaacgctgaagcttgaggagcgcgccatgaccgttaatctcaccaccgccaacgaattcatcgcccgccacatcggcccgcgccaggaagatgagcagcagatgctcgccagcctgggttttgactccctggaagccctgagcgccagcgtgatcccggaaagcatcaagggcaccagcgtgctcggcctggaagacggcctgagcgaagccgaagccctggccaagatcaaggccatcgccggcaagaaccaactgttcaagacctacatcggccagggctactacaactgccacacgccgtcgccaatcctgcgcaacctcctggaaaacccggcctggtacaccgcctacaccccgtaccaacccgagatttcccaaggccgcctggaagcgctgctgaacttccagaccctgatcagcgacctcaccggcctgccgatcgccaacgcctccctgctcgacgaagccaccgccgccgccgaagccatgaccttctgcaagcgcctgagcaagaacaagggcagcaacgccttcttcgcctcgatccacagtcacccgcagaccctcgacgtgctgcgcacccgtgccgagccgctgggcatcgacgtggtggtgggcgatgagcgcgaactgagcgacgtcagcccattcttcggcgccctgctgcaatacccggccagcaacggtgacgtgttcgactaccgcgaactgacggagcgcttccacgccgccaatgccctggtggccgtggccgccgacctgctggccctgaccctgctgaccccgccgggtgagttcggcgccgacgtggccatcggcagcgcgcaacgcttcggcgtgccgctgggctttggtggcccgcacgcggcgtacttctccaccaaggatgcgttcaagcgcgacatgccgggccgtctggtcggcgtgtccgtcgaccgtttcggcaagccggccctgcgcctggccatgcagacccgcgagcaacatatccgccgcgagaaagccacgtcgaacatctgcaccgcccaggtattgctggccaacatcgccagcatgtacgccgtgtaccacggccccaagggcctgacccagatcgcccgacgtgtgcaccagttgaccgcgatcctggccaagggcctgactgccctgggccagaacgtcgagcaaacccacttcttcgacaccattaccctgaacaccggcgccaacactgccgccctgcacgaaaaggcccgtgcccagagcatcaacctgcgcgtcgtggacggcgagcatcttggtgtgtcggtggacgaaaccaccacccaggccgatatcgaaaccctgtgggcgatcttcgccgacggcaaggccctgccggacttcgctgccaaggttgaaagcaccctgccgaccgccctgctgcgtcagtcgcctgtgctcagccacccggtattcaaccgctaccactccgaaaccgagctgatgcgctacctgcgcaaactggccgacaaggacctggcgctggaccgcaccatgatcccgctgggctcgtgcaccatgaagctcaacgccgccagcgaaatgatcccggtgacctgggccgagttcggtgccctgcacccgttcgccccggccgaacaaagcgccggctacctgcaactgacgtccgaactggaagcgatgctctgcgcggctaccggctacgacgcgatctcgttgcaaccgaacgccggttcccagggtgagtacgccggcctcctggccatccgtgcctaccaccagagccgtggcgaagaacgccgcgacatctgcctgatcccgtcgtcagcccacggcaccaacccggcaaccgccaacatggccggcatgcgcgtggtcgtcaccgcgtgcgacgcccgtggcaacgtcgacatcgaagacctgcgcgccaaggccatcgagcaccgcgagcacctcgccgcgctgatgatcacctacccatcgacccacggtgtgttcgaagaaggcatccgcgaaatctgcggcatcattcacgacaacggcggccaggtgtacatcgacggcgccaacatgaacgccatggttggcctgtgcgccccaggcaagttcggtggcgacgtgtcccacctgaacctgcacaagaccttctgcatcccccacggcggtggcggcccgggcgtcggtccgattggcgtcaagtcgcacctcacaccgttcctgcctggccacgcggccatggaacgcaaggaaggcgcggtgtgcgcagcgccgttcggcagcgcaagcatcctcccgatcacctggatgtacatcagcatgatgggcggtgcgggcctcaagcgcgcttcgcaattggcgatcctgaatgccaactacatttcccgtcgcctggaagagcactacccggtgctgtacaccggcagcaacggcctggtagcccacgaatgcatcctggatctgcgcccgctgaaggacagcagcggcatcagcgtggatgacgtggccaagcgcctgatcgacttcggcttccatgcgccgaccatgtcgttcccagtggccggcaccttgatgatcgagccgaccgaaagcgaatccaaggaggaactggaccgtttctgcaacgccatgatcgccatccgcgaagaaatccgcgcagtggagaacggcacgctggacaaggacgacaacccgctgaaaaacgccccgcacaccgccgccgaactggtgagtgagtggacccacccctacacccgcgaacaggcggtgtatccagtgccatcgttgatcgaaggcaagtactggccgccggtggggcgtgtcgacaacgtgtttggtgaccgtaatctggtgtgtgcgtgcccgtcgatcgagagctacgcataaccaaaggatgcattgggtacaaatgtgggagggggcttgcccccgaatgcggtgcatcagccacagataagctgactgacacaccgtcatcgggggcaagccccctcccacactagatcgagtcaactttcagaaaataataagaaaccggagaacaaccatgtcccttagcgtgttcgacctgttcaagattggcattggcccctccagctcccacaccgtcggcccgatgcgtgcggccgctcgattcgtcgagggtctcaagcgtgaccacctgctgggcgccaccacctgcgtcaaggtggaactctatgggtcgctgggcgccaccggcaaaggccacggcagcgacaaagccgtactgctgggcctggaaggcgaacacccggacaccgtgaataccgaaaccgtggcaacacgcctggcgcagatgcgcaaggacggccacctgaacctgctcggtgaacaccgcattgcgttcaacgagaaagaacacctggcgatgattcgcaaacccctcgcctaccatcccaacggcatgatttttcgtgccttcgacgccgcccacatccagatccgcagccgcgagtactactcggtcggcggtggttttgtggtggacgaagacgccgccggcgccgaccggattgtcgaagacgccacgcccctgaccttcccgttcaagcacgccaaggacttgctgagccattgcaccacttacgggctgtccatcagccaggtgatgctgaccaatgaaagcgcctggcgcccggaagcggaaacccgcgccggtttgctgaaaatctggcaggtgatgcaggactgcgtggacgccggttgtcgcaacgaagggattctgcccggtggattgaaggtcaagcggcgcgcggcggccctgcatcgccagctgtgcaaaaacccggagtcggcgttgcgcgacccgctgtcggtgctcgattgggtcaacctctacgccctggcggtcaacgaagaaaacgccaacggcgggcgcgtggtcacggcgcccaccaatggtgcggccgggatcgtgccggcggtgctgcattactacatgcgttttatccctggcgcgaatgaggacggcgtagtgcgcttcctgctcaccgcggccgccatcggcattctgtacaaagaaaacgcctcgatctccggcgccgaagtcggctgccagggcgaggtcggcgtggcctgttccatggccgccggtgcgttgtgcgaagtattgggcggcagcgtgtcccaggtggaaaacgccgccgaaatcggcatggagcacaacctcggcttgacctgcgacccgatcggcggactggtgcaggtgccctgcatcgagcgtaacgccatgggctcggtcaaggcgatcaacgcagtgcgcatggccttgcgcggcgatgggcagcactttgtgtccctcgacaaggtcatccgcaccatgcgccagaccggcgccgacatgaaaagcaaatacaaggaaaccgcccgtggcggtttggcggtcaacattatcgagtgctgacgcctaaaagcgcgccagcacgtttttcaggagctgaatatgtccaccaaaaccctgttgaaaacccctctgcacgccctgcacctcgaactgggcgcacgcatggtgcccttcgccggctacgacatgccagtgcaatacccgctgggcgtgatgaaggaacacctgcacacccgtgatcaagccggcttgttcgatgtgtcccacatgggccagatccgcctcaccggtgccaacgccgccaaggccctggaaaccctggtgccggtcgacatcatcgatctgccggtgggcatgcagcgttacgcgatgttcaccaatgaccagggcggcattctcgatgacctgatggtggcgaacctgggtaacgacgaactgttcctggtggtcaatgcggcctgcaaggaccaggacctggcgcacctgcgccagcatatcggcgaccagtgcaccatcgagccgctgttcgaagagcgtgcattgctggcgctgcagggcccggcggcagtcaaggtactggcgcgcctggcaccggaagtgaccaagatgaccttcatgcaattcgcttccctgcgcctgctgggcgtggactgctatgtcagccgttcgggctacaccggtgaggacggcttcgaaatctccgtgcctgccgccaaggcggaaagcctggcgcgcagcctgctggccgagaccgaagtacaggccatcggcctgggcgcccgcgactcgttgcgcctggaagccggcctgtgcctctacggccacgacatgaataccgacaccaccccgatcgaggccagcctgttgtgggctatctcgaaggcccgccgtgccgacggtgcgcgtgccggtggctttcccggtgccgacaccatcttcacccagcagcaagccggcgtgagccgcaaacgtgtaggcctgctgccacaggagcgtacgcccgtgcgtgaaggcgcggaaattgtcgacgcagacggcaccgtgatcggcagcgtgtgcagcggcggtttcggcccgaccctcggcggcccgctggccatgggttacctggacagcgcattcatcgcactggataccgaagtctctgcgttggtgcgtgggaaaaaggtgccacttcgtgtaagtaaaatgccatttgtgccacaacgttactatcgtggctgattgactgtttctataagtaacgcgattgcgttaacgtgcactaatctgtaacgcaatcgccataaaacagtgcacttccgatagtcttttatagagggatcaacctataacaagtgaccaactctatcgaataagtcagttccacactgttcaacaaagtgtcatgagccccagcaaaacctgggcttttggcagggcttgttttttctctattagttggcgtagagtttgcccactgtgtttgcatgggtcgcttggaacctggacctgggcagtagctgaagaagtccgctacaacccgttcgacgtctcttactttcctgcaacccagcccagtactctttcatgcgaaaggggctgtcattaatttttagcgtcaaggaaataagaaaatggctgaacgtcagagcggtaccgtcaagtggtttaacgacgagaaagggtttggttttatcactccagaaagcggtccggatctgttcgtgcatttccgcgctattcagggcaacggcttcaagagcctgaaagaaggccagaaagtgacattcgttgctgtgcaaggccagaaaggcatgcaggctgacgaagtactggcagaaaaccactgagttcttctgcgacaaaaagcccctgatggtgacatcaggggcttttttatgtgcatttgctcgtaaaatggctttttttcataagagagccctgccatgtcgaaacccctgctgagcccccaaggcgaattccccgccgttggcctgggccgtcgcctggcagcgatgttctatgatttcctgctatgcaccgcactgctgatcgtcacagcgtttatctacaagctgatctggatcgcgtttgtcggtgaagccaggatgcgcaccctcaccgaatccggcgcgctggatggcgacccgttgttatcgacgattctgttgtttgtgctgtttggctttttcgccaagttctggacccattccgggcagaccctgggcatgcaggtgtggggcgtacgcgtacagaacgctgacggctcgcggatcagcctgtggcaggcgctgttgcgcttcgtggtgtcgattgcgtcgtggttgtgcgtggggctggggtttatctggtcgctgtttgataagcgcaaacgcagctggcatgacatctattcggacacgcagttggtgcggattcccaagcagaagaagtagccttctacctattggatatcaaaatgtgggagggggcttgcccccgatagcagtgtgtcagtcacaggtgtattaactgatccactgctatcgggggcaagccccctcccacattttttaccgcgttcgactatgcgttaccggcccgcttcagccgcgccgcctgggtgaaatccaacatgcgcttgagcggacgcactgcctgcgggattaccgacggttcgacgaatatctcgttactgccctcacgcagacactgcaacgtgcgttccagcgtgttcatcgccatccacgggcagtgcgcgcaactacggcacgccgcgccgttaccggcggtaggcgcttcgacgaagaccttgtccgggcacagctgctgcatcttgtaaaagatgccgcggtcggtggcgacgataaacgtcttgttcggcaggcgctgggccgccgcaatcagctggctggtagaacccacggcatccgccagttcgatcaccgaggtcggcgactccggatgcaccagaatggctgcatccgggtaaagcgccttcatgtcttccaactgcttggatttgaattcttcgtggacgatgcaggcaccgtcccacagcaacatatcggcaccggtctggcgctggatgtatgtgcccaggtgcttgtctggcccccagatgattgtctcgccgttgtccatcaggctttcgacgatttccagcgcgcagcttgacgtcaccacccaatccgcccgggctttgaccgccgccgaggtgttggcatacaccaccacggtgcgttcgggatgctggtcgcagaacgccgaaaactcatcgactgggcagcccaggtccagggagcaggtggcttccagggtgggcatgaggatgcgcttttcaggcgtgaggatcttggcagtctcgcccatgaaacgtacgccagcgaccaagactgtcttggccgggtgagcggcgccgaagcgggccatttccaaggagtcggagacacagccaccggtttcttcggccagggcctggataaccggatcacagtagaagtgggcaaccagcaccgcatcctgagccttgagctcggcggcgatggcagtgcgcaggctcgcctcttcatcggcgctgagggccttgggctgcttggcgtcgaggtgggcttgaaccagaaggcgttcggaaatttgcgtcatgttcgcaagacctgcaggcgcagttgcgcgaaagtcgagtgtaccaccggctctggagcccttcgggcaccgccggacgaagtgattgtgttcatcaagcacgggttaaggtgaagctcggcaaggctacagaatatcgaatggtttcaaaagcctaatctggtactcgcctgcgccttcgtggagcaaaaaaaaggaaaccccgcttggggtttcctgcgtttaccgccggttgttcatcaaaaacggtaagtcaccgaaccaccaaacccgttggcgctgttttcatacttcgcatcgtaggtcaggccaacctgggaaaggttctgccgcaccttgatcggctcttccttgaggtaggaatacgccacatcgaaggtcaggttatcgacgggcgtccagccggcacccaggctgaaaacggtgcggtcccccgtgggaatccgcacggagcggtcggtgttgttggtaggcgtctggtccaccgagagaccggtccgcagtacgagttctttgttgacccgataggccgcaccgatcgcgtgagaccaggtgtcatgccagtgctgctgctctgtgatggcgcccaggccaccgaattgagcagtgaggtcggagactccatcgttattgatggtgatctttttcaactgactccagcgggtataggtgctgccaaggtacaaggtccagtcgtcattcagttgatgggttaccgagaaatccaccgatgacggcgtggtcacgtccaggctggcgtcatacttctgcggcccaccgtcgaaggcatcggaaatcaagccggaggcatgggtcttgccgctgaggtggtagaccacctgcgagtggtaggtcacaccgatgcgcgtgctctcaagaggctgcatcaggagaccggcgttgaacccggtagcgttgtcgtcacctttgactttcacactttcgccggcgccgccacccagcggcacattggaatccagctcgccactgatgcggttgaaggtcgggccaaagcccaccgacactttatcgttgaaggcatagctgaccgtcggttgcacggtgatgacctggaccttgctcttgttgccaaagccattgccctggaagctgtgttcatagtcggtcaccaggccgaacggcgcgtagatgcccaggccgaatgcccagtgctcatcaatgggcgtgaccaggtagcccatcggcacggcaatgccgggcaccatatcgcccttgttggtgcctgggttgtcggcaccgaactgcgaggaactggcgtccttgatgttggatttggcatcgaggtaagtcgcaccgaggctgacttcattctgcttcagacgcgacatgccggcggggttgccgaacaccgtgctggcgtcttcggccgaggaggaacgaccggcgtagcccgtacccattgaactgatgctttgttcattgagcgcgaaaccaccggcgaacaacggggttgaggcaagggaaacggcaagcgccaaggcgcctttaagagttttgttattcattattaggactcgaattatggggcagcgatggggaagctaccaacgttcgagcgaggggtttatgaagagtttttcatgcactgaattgtcggacaattctatgcatttcaatgactttagctgttttttcgtttccagcaatgaccttttcacccgaatctgaccagccggttttaaccacggattggctatggctcagatataaaaaaccccaagcgcttcatacgcttggggcattcggtgtgttcaaacaggcaaaaaaaaacccggaaatcctcacttgcgtgggccttccggattttctaaaccgccaaaaatggtgggtcgtgtgggattcgaacctacgaccaattggttaaaagccaactgctctaccaactgagctaacgacccgctgtgtggtggcgcgtataatactgatttctaaggattattcaacaccttatttgaaataaatcagaaataacgcgttgggtcagtaattccggcggcttggaagccttctgcacgcagtcggcagctgtcgcatttcccacaagcacggccgtcatcgtctgcctggtagcaggaaacagtcagcgaataatcgacgccaagtcctacacctgccttcacaatgtcggccttgctgaggttttgcagcggcgccaggatacggaagccctgcccttctacaccggcctttgtcgccaggttggccatgcgctcgaatgactcgacgaattctgggcggcagtccgggtagccggaataatccaccgcattgactccgataaagatatcgcgggcgttgagcacttctgcccagcccagggcgagggacaggaacacggtattacgcgctggtacgtaagtcaccgggatgccttcgccgggggtttccggcacatcgatgctgctgtcagtgagggccgagccgccgatgccattgaggttcaaaccgataaccttgtgctcgaccacccccatgtcacgggcaacgcgggcagcagcgttcagctcggcgcgatggcgctggccgtagtcgaaactcatggtgtagcaggcataaccttcagcttgcgccatcgccaccacggttgccgagtccaggccaccggacagcaggattaccgcgcgtttttgatcaatcattggttcagtcatttcagcgtcctggctcgtcgttccaaaggtatttatgcagttgcaattgcagacggactggcaggttatcagccaccacccagtcggcaaggtcgcgcgcgttcagatcatggtggcttggcgagaacaatacttcgcctgcgcggcgatcaaggccgtactgaatcagcttggagttcgcccagtcgtagtcatcgcgcgaacagataacgaacttgacctgatcgttggccgtcagcaattcgatgttctcgtagcgattgcggtgcgcttccttggagccgggggtcttgagatccaccacgcggcttacacgcggatcgaccgccgagatatccagcgcgccactggtttccagggagacctcgtaaccggcgtcacacagctgcttgagtaatgggatggcattgggctgggccagcggctcaccaccggtcacgcagacgtagcgcggcttgtagccggcaacctgttccaggatgtcatcgagggtgcgcaccgtgccgccactgaaggcgtaggcgctatcgcagtactggcaacgcaaggggcaaccggtcagacgcacaaatactgtgggcaggccggccgttcgcgtttcaccctgcaacgagtaaaaaacttcggtaatacgtaatgtgtcttgcatagtcgccacgggcgtaacagctaaacaggctgtccgcctccgtcaggcactttaagggaccccgccaacgcgtagaccccaaaaagcgtgtttcataaaagggcgtggattctaacgaaaaaacccgcgccaggcgcgggtttcttctaaacgggcaaacgtcgcttacaagcgctgcagatcccgttgggccaactgggcagcggaagtccccggatactgggccaccacctgttgcagaatgcctttgaccttgtcggtatgacccaggcggcgttctacgtcagcgagtttgtacagcgagtccggcaccttggcgtgcttggggtacagctggctgaccttggcaaatgcctggcccgcgccctgtagatcaccctttgccaggttgacttcacctaaccagtactgggcgttgcccgcgtattggctgttcgggtatttgcgcaggaaagcggtaaaggcctggctggccttgtcgaaatccttggctttgatcaggtcgaaggctgcatcgtaatacagcttttccttcgccggatcacccggttcgctgctcgcggcaggggcttggctggcagccgcccctgctgctgcaccggcagcagcgctaggcgcgccaccggcagaagaattatcaggagttgcggcaggttgaacgccggctccaatacgttgatcaagatccttgtaacgctccaggccttcttgcttgagctggttcacctggttttgcagtacctcaatagcgccttgctgctgcgcgatttgatcctgcatgcgttgcagctggttgaacagttcgccctgtgccgagggagcggacgtagccgctccccccgcataggcgccgttcgtgccataacccgctggcggataactgctcccgctattgttatagccagagttgctatcttccacaggaaccgcagcccacaccgcaagcggtgcgaggctgagagccaatacagtcagagcacgacggcacgttcgcatgacgaattacttacgcagttcgacgcgacggttttgagcccaggactgctcgtcgtggccagtagcaactggacgctctttaccgtaggaaaccagttccagttggcctggagcaacaccttgcagtaccaggtagcgctgaacggctttcgcacgacgctcgcccagtgccatgttgtactcacgagtaccacgttcgtcagtgttaccttccagaacaacgcgagcgccgttagctttcaggtccttcgcgtgaacgtccagagcgcgcatggcttctggtttcaggtccgaactgtcgtattcgaagtagaaagtggtgatagcgcgcagagcagcttcttcgctcagggagccgtcaaccgcaccagtgttagcgccgtaaccagcgtttggatcaacagctgcgccttcaccggcattgtcgccgcctttagacgagcaaccaacggctacggacagagccagagccagagcagcaaacttaccaaacttcagcatttccatcgtgaaactcctaatgaaccccagtgtgttaagcaaatctttttgtagcgccgcgtcagttcaggtaaggggaccaggatggttctctgacttcgccttgtgcggtaggaagtgggagccttacgcgtccattaatggacacgagcatcaagactccccggccctgctggcgggtggcgtagattaccatggtgccgttgggcgcaacagtggctgactcatcaaggttggtatctgtaaggatttttacggttccgcgctgcaaatcctgggccgcaacccggaaattagtgaaaccatcctgacggtgaatcatcaccaacgtcttttcatcagccgaaagtttagggttggcgttgtagttaccgataaaagtaacccgttctgcaccgccaccattcacgttcgccttatagacctgtggcttgccgcctcggtcagaggtgaagtagatggtcgaaccatccttgccccagaacggttcggtattgatacccggaccgctggttgcacgagtgatctggcgcgtggccatgttcatcacgtagatgtccgggttgccgtctttggacaacacgaacgccaggcgcgaaccatccggtgaccacgctggcgcaccgttgaggccttcgaagttggtgatctgctcacgacggccagtatcaatgtgctggacgaagatacgcggacgcttctgctcgaaagacacgtaggcaatgcgcttgccgtccggcgcaaaacgcggcgacaggattggctcacgggattgcagcaaggttacagcgcgcgcaccgtcgtagtccgaacgctgcaaggtgtagcgagtgttgtccaccgagaaacgctcagccgttacgtacagcaggcgcgtcgagaaagcccccttgatgccggtgagcttttcaaacgactggtccgaaatgtagtgggccatgtcgcggatctgctcggcagtgcccgagacgctgccggtcaggacctgctgctcggtcgccacgttgaacaaggtgtaggtgatttgcaggcgaccgccggccggcgtgatgttgccgaccatcaggtactgcgcacccaccgctttccaatcacggaacacgacttcgctggcctggtttggctggctgatcatgttgccttttggaatgggcgcgtagtaaccggagttgcgcaggtcgtcactgacgatctgggccatgtcgtccggcagcacgctgccgccctgccagccgaacggtactaccgcgatcggggtggcccggtcgctaccgctggtgaccaggatgttcttttcatccgccgccgctatccctgccatacagcaaataacgacaagcattcctcgaagaaggtttctcacaaggctagatcctcaggtgtgaatgtcatcttgaatgaacgatagggagcgaagtcacttggtttcattccctgcatctcggtcaaccggccaatgttcttgactgcggcaaccgccgaactgtcgaacgaaccgtcaccactggacttggccacgctgaccgaagtcaccgtaccgtccggcaacatgccgatctgcagcactaccgtcatgcctttgcgcgccgaaggtggacgagtccagccttctgctgcccgcgcccgaatcaggtcatcgaaactgcccgcgacttcatcaccacgttcatcggccaaggcttgctgacgctgcggcgtgtcggagagcaaatctgccaaggcctgggccttcttctcttcggcggacttgcgcgctgcttcctgggcctttttcttctgggcgtcggcggcagctttcttcttcgcgtcgtcggcgacttttttcttcgcctcgtctgcttcagcttttttcttggcgtcttcggcggcttttttcttcgcgtcttcgactattttcttcttggcgtcttcagcggcctttttcttggcctcttcttcggcagccttcttggcttcttcttcagatttcttcttggctatatcagccaattgtttctcttcggcctttttcgcttcggcagctttctcggctttcttggcttcatcagcctttttcgcctcgtcagccttcttggcttcatcagcctttttcgattcctcggccttttgagccgcctcttctttcttttgttccgcagccgccttcaccgcttcctgctcgaccttcttctgttccatctgttcgacttcagtctggcgtgcagccgacttctgggcctcacctgcaatcttctgattggtctgggtggtggcctggcttttcgatttcagctgatacagggtcgcctgcacgatcggcttggctggcggcaggtccggggtcatggcaaagctgacgaacagcatgccaaacaccaggacgtgcagggcaatcgcccagacgctaggccagaagaagctttccgaggcggacggctctcgctgttgctgcatcagggcgcctcggtaatcaagccaacgttacccacgccggccttctgcagcccgcccatggcgcccatgacagagccgtagtcgaccgatttgtcgccacggatgaacacctgggtgtgcttgccgccttcgttgccggagcgaatgatcttggtcaccgcatcggtcatcgccggcaaggtgagagccttgtcttgctgcttctgcgtgtcgacttcgctgccaaggttccagtaataggtcttgtcagccttgatcgaaatggtcaggacttgagtgttgttgtcttgcggcaaggcttcactggaaaccttgggcaaatcaaccttcacgccctggttgagcatcggcgcggtcaccatgaagataaccagcagcaccagcatcacgtcgatgtaaggcactacgttcatctcggcgaccggcttgcgctttttgcgagctcgagcgattaaagccattgggaattacctgcttattcttcgctggtgtgcactttacggtgcaggatcgcctggaactcatcggcgaaggtgtagtaacggccgatcaacgtttcgctggtggcagcgaagcggttgtaggcgattactgcggggatagcggcaaacaggccgatcgccgtggcgatcaaggcttcggcgatacccggggccacggtggccagggtcgcttgctgggcctgggccaggccacggaaggagttcatgatcccccacacggtaccgaacaggccgatgtatgggctgacggaaccgacggtggcaaggaacggcaggctttgctcaagcttttcttcttcgcgggaaatggcgacgcgcatggcacgggccacaccttccatcaccgcttccgggtcaacgcctggctgctggcgcagacgggagaattccttgaagccggcgcggaagatctgctcgacgcccgaatccgggtccgggttgctgccagcctggcggtacagcttggacaggtcgatacccgaccagaagcgctcttcaaagctctccagggcacgtcgaccagcacgcagcaggttgctacgctgaaaaatcatgacccaagaggtaaccgatgcggctaccagggtcagcatgaccagttgaaccacaacactggcattgctgaccaggctccacatggaggaatggtcgacgacggtaggttccacgctaaatctcctgctttgattgtttacccgcgccgcttacgtcggcaaaggccgcacgtagagcttcgggaatggcccggggtttcaaactattggtgcgcacacaggccaccaggaactgcccctcacagagcagcgttgcatccgttgcccgcctgacctgctgcttgaaacgcaggctgacacggttcaattcgattacttcagcgctgaccaacagctcgtcgtccagccgcgccggcgcgtgataccgcgcctcgctggagtgcacgacgaataacaggtcctcgcctgccagctcggattgggcaaagcccagctcccgtagccgctcggttcgagcccgctccatgaacttgaggtagttgacgtaatacacgatgccgccggcatcggtgtcctcgtaataaacgcgacagcgatgtgcgaacgactgatccccgttttgcgcgcgcatactctagtgcttactcctcaggttgccaatccggctgggcaactgttttttcattgtctgaaacttttctaccgactgaatgacgacaccagccactaggacagcacaaacctcggataaatcgtctggcgtgaagcttttaatcgtccactgcatcgagaaattcgtctactacaggcatctcgcccaatcgtgacggaatgtttaacccaaagtgcagataggcgtggcgcgtcaccaccctgccccttggggtacgcatgatgtaaccctgctgaatcaggtacggctccagcacgtcctcaatggtatggcgctcttcactgatcgccgccgccagactatcgacacccaccggccctccgtcgaacttctcgatcatggtcaagagtagacgccgatcctggtgatcgaagccatgctcgtccacatccagcaggttcaaagccaggtcggccacggccttggtgatatgccccttggcccgcacctcggcaaaatcccgcacgcgacgcagcaaacggttggcgatccgtggcgtgccgcgggctcgacgggaaatttcaaacgcgccttccgggtccagcggcaggccgagaatattcgccgaacggctgacaatggtcgccaggtcagccgtgctatagaactctagacgttgaacaatgccgaaacggtctcgcagcgggttggtcaacatgcccgcacgggtcgtggcaccgaccagcgtgaacggcggcaggtcgagcttgatcgagcgcgccgccgggccttcgccgatcatgatgtcgagctggaagtcttccatggccgggtacagcacttcttcgacgatcggcgagagccggtggatctcgtcgataaacagcacatcgtggggttcaaggttggtcagtaatgcggccagatcccccggacgctccagcaccggaccggaggtggacttgatcgacacgcccatttcctgagcaataatattcgccagcgtggtcttgcccaaccctggcgggccgaagatcaacgtgtgatccagggactcattgcgcccgcgtgcagcctggataaacaactccatctgctcgcgcacggtgggctggccgatgtactcggccaggctcaggggccggatggcgcggtcctggacctcttcacggtcgcgcgggccggtggctgcaatcagacgatcagcttcaatcacttaaatcattcccttcagggcgcggcggatcatgtcttcactgctcaggttcttgtccttgatggccgatacggccttgctggcttcctgcggtttgtaacccagggaaatcagcgcgctgactgcatcgctctcggcactcgccacctggccggccggcatgtccggctggttcgggacgagggcaaacatgctcggtacgacttcccaggccttgaagcggtccttgagctccaccagcaggcgctcggcggtcttcttgccaacgcctggcaccttggtcagcgccgaggtgtcctgggccgaaacggcacgcaccagctcatccacttccaggctcgacatcagagccagggccagtttcggccccacgccattcaggcggatcagctcacggaagaagtcgcggtcacgcttgccaataaaaccatagagcaattgcgcatcttcgcgcaccaccaggtgggtgtgcagcgtaatcggctcaccgaccgacggtaggcgatacagggtggtcatgggtacttccagctcataccccaacccatttacatccagaatcaggtgcggcggctgtttttcagccagggtgccgcgcaagcgtccaatcacggttcagatccttaaagctagggtcagagcaaggcccgaccggaaaacgattgcgctgatgctatcagagacgcaggcgcccgccacgactgcgtgccgtgcccaggccgtggggcagcaagcttgagcgggtgtgcgcatgacaaatggcaatagccagggcgtccgaggcgtcgatctgcggcttggcggtgagcttgagcatgtgcatgaccatcatctgcacctgctctttgttggctgccccggtgccgaccacggcctgcttgacctgggtcgcagtgtattcggcgatctccatgccctcctcggcgcccgccacgatggcagcgccgcgggcctggccaagcttcaacgcggagtcggcattctttgccatgaacaccttctcgatgcccatggtcaccggcccgtaggtctggatcacttcacgcacgccgcgatagacgatctgcaggcgctcggccaactcgcccgcaccggtgcggatgcagcccgaagccacatacacgcagccacgcggggtctgttgcaccacgccaaaaccggtaatgcgcgaaccggggtcgatacctaggattaaagtcataacgcctgcgggttgggtaaacacaatttttcatacagagactaaccaatgtgggagggggcttgcccccgatggcnnnnnnnnnnnnnnnnnnnnnnnnnnnnnnnnnnngccatcgggggcaagccccctcccacatttaaaactacatcgcccttcagcctagctgttcggcgacagactctgggatatccgcattcgaataaacgttctgcacatcatccaggtcttcgagcatatccagcatcttcagcactttctgcgcgccatccaggtccagctcggcgctggtggtcggcagcatcacgatttccgcgtcagtacctttgaaaccggccgcttccagggcattacgcacggcgtagaagctggcgaacgaggtgaacacgtcgatggagccatcttcgttggtcaccacgtcatcggcatcggcttccatggccgcttccatcagcgcgtcttcatcggtgcccggtgcgaaagagatctgccccttgcgctcgaacaggtaggccaccgaaccgtcagtaccgaggttgccaccacatttgctgaatgcgtggcgcacggcggcggcagtacggttgcggttgtcggtcatgcactcgaccatcaccgccacaccgcccgggccatagccttcgtagctcagctcgaccatgtcgtcggtatcggccgcaccggcaccacgggccacggcacggtcgatgatgtcacgactcatgttggcacccagggccttgtccagcgccaggcgcagacgcgggttggagcctgggtcacccccaccctggcgggccgcgacggtcagctcgcggatccatttagtgaaaatcttgcctttcttggcatcctgacgctctttgcggtgcttgatgttcgcccacttggaatggccagccataacacaactccaaaaattctctagaaaccttatcaattccgccccaggcagaatgcaacccttgtaacgcaaaggcgcatccgaagatgcgcctttttagactgcgtaaacctcagtgcgctttcacgcagcagccttactcagccttcggcgtctcgcgcagacggatgtgcagctcgcgcagtgccttggcatccaccacacctggagcctgggtcatgacgtccgcagcgctctgggttttcgggaaggcgatcacttcacggatcgactgggcgccggtcatcagcatcaccagacggtccaggccgaacgccaagccaccgtgcggcggcgcgccgtatttcagggcgtcgagcaggaagccgaacttctcttcctgttccgcttcgttgatgcccaacaggcggaagaccgcttgctgcatctctttgcggtggatacggatcgaaccgccacccagttcggtgccgttgagcaccatgtcataggcccgggacagcgcgccagccgggttggcttccagctcggccggcgagcacttcggcgcggtgaacgggtggtgcaaggcgctgaagctgccgtcgtcgttctcttcgaacatcgggaagtcaacgacccacatcggagcccattcgcaggtcagcaggttcaagtcgtgacccagcttgatgcgcagtgcgcccagggcttcgctgacgatcttggccttgtcggcgccgaagaacacgatgtcaccgtcgactgcaccgacgcgatcgaggatcgcgttcaggttgtccagcggaatgtttttaacgatcggcgattgcaggccgtcaacgccattggcgcgctcgttgaccttgatgtacgccaggcccttggcaccatagatgccgacgaacttggtgtagtcgtcgatctgcttgcgcggcatgctcgcgccgcctggcacgcgcagggcggcgatgcggcatttagggtcgttggccgggccgctgaacaccttgaagtcgacttctttgagttggtcggccacgtccaccagttccagcgggttacgcaggtctggcttgtcggagccgtagcggcgcatggcttcttcgaaggtcatgtgcgggaagtcgccgaactccaggtccagcacttccttgaacaggttgcggatcatctgttcggtcaggcccatgatttctttttcatcgaggaagctggtctcgatgtcgatctgggtgaattcaggctggcggtcagcgcgcaggtcttcgtcgcggaagcacttagcgatctggtagtagcggtcgaagccggcgaccatcagcagttgcttgaacagctgaggcgattgcggcagggcgaagaacgaaccggcgtgggtacggctaggcaccaggtagtcacgcgcgccttccggggtggcccgggtcaggatcggcgtttctacgtccaggaaaccgttttcgtcaaggaaacgacggatgctggtggtcatgcgcgaacgcaggcgcagcttctcggccatttccggacgacgcaggtccaggaagcgatagcgcaggcgggtctcttcgcccacgtcagagtattcgttgagtgggaacggcggggtttccgactcgttcagcacttccagctcatagcccagcacttcgatgccgccggacgccatgttcttgttcacggcacccgccggacgcaggcgaaccttgccggtgatcttcacaacgtattcgctgcgcacgcggtcggcggcggcgaagcttgcggcgcgatccgggtcgaacaccacttgggccagaccatcacgatcacggatatcgaggaagatcaccccgccgtggtcgcggcgacggtgaacccatccgcaaagggtgatttcctgaccttccagggtctcgttcagttggccgcaataatggctgcgcatcatggtagtggtttcacttctcgtaattcgaaattcggtggaggcctgcctcgtcaccggacattaaagcaggggacggataatgcaggagcctgcgcgtagagttcaactcagtctgctttgtcgccgccggccaggttcttcttcgagccggtcttgaaatcggtctcgtaccagccattgccgctcaagcggaagcccggcatggacaacatcttcttgagttccggtgcctggcaggctgggcaatcgaccagcggcgctgcgctgatcttctgaatggcttccaactgatgaccgcaggaagcacattggtagtcgtacatgggcatggcgatgtctcggcgatcagaacgttactgcgccacgcctgccctacggatccgcagcatgcgtagcaaagcgcgggattatatccggtaaatcgaggcagcgcagccggcattctgcccggggccctgcccgccatgatagagggccggccccgaagcccggtggctataccggtgaacaggcgggttcagcacgccctttcaggacgtgcaccacacaaaccaccctgaccaacccactgaagttcttcaccccgccataacgcaagtgcacttcccgatcgacataagacagcaacgcactgactgagcaggcattgatcctggcgatttccgtgaggatattccaatagatctgctccagccgcaggcacgtggaaaatccattgagccttaccgatcgggacagcggcttggccagtcccatatcgaacccttttgcaaacgggtcgatctttatcttatgaaaaccaccggtttccatcactccattacccactccgcgtgacatacacctgacactccattgccaaacaaccgcccatgggtactcccattgggcaatggccctataaaacagcagggagcggcgggcaaccagaagacgcggagttgatcggcgtaggacaacgccaggaaatgcgcggaaacaagcgagcggcgccagggcgacgccactcaaggccagcgtttactgattttcaagcagggaacgcagcatccacgcagttttctcatgcacctgcatacgctgggtcagcaggtcagccgtcggctcatcgctgaccttgtcgagcagcgggaagataccgcgcgcggtgcgggtgaccgcttcctggccagccaccagttgcttgatcatctcttcggcgctgggcacgccttcttcttccttgatggaagaaagacgggcatagatggagtaggcacccggcgccgggaaccccagggcacggatacgctcggcaatggagtccacggccagggccagctcgttgtactgctcttcgaacatcaagtgcagcgtgcggaacatgggacccgtgacgttccaatggaagttgtgggttttcagatacagaacataggtatcggaaagcagtcgcgaaagcccgtcgacgatggatttacgatcttcttcactgataccgatatcgattgccatgtttatccccttcaattgacaagcattcattgatcaggtgcaggaccactctagcaagagtgccggtgatgcgcagcccggcgcggcaattcgccccggtgcgccctgtcgaccggcacaacccaagcctttgaggcaagtaggaaatttctctgctggccgtttgaaaaaactgcacgcgtctaggacaagcgtttgctgcagaaatgccatcgcccttgcaataccccgaaatgcttgatttgagtaggcacagcctttgctgttaaatagatggcgtgtcgccgccgttactttctgcggcagcggcataggctgataccccgcgcacgtgcccaacgcctcccattgttcagaagcgaaccgtgccagtcagctcttccttgtgatccgtcttaacgtgagttaatcaaaatgttgaaaatcgtccacctgctaacgggcgttgcagctttgctgctgtcctttatcccgagcctgcagcctgaaagcctgccgtatctggaacaacacgacgctctgtacctggccatgttcggccttcttaacctgacgctggcaccggtgatcccttactggaacaaaggcccacgtcatcaactgcaaaacctggtcagcgcgctgctggtactgaccgttgtcgtacaaaccctcaccctcctggcacccatgcctgaagtcggcggccacccggccatcctgctcagcctggtgattgctgtggtcgccatcgttcttcacctggccatcagcttctaccgttcgtcccctgcggcctcgtcgcaaacctacgacatgaccaatcgggataccggtaccgtcaagtggttcaacacatccaaaggcttcggctttatttcccgtgattcgggcgacgatatcttcgtccacttccgggccattcgcggcgaaggccatcgcgtcctggtggaaggccagcgcgtggagttctccgtgatgaatcgcgacaaaggcctgcaggccgaagacgtgatcgctgcactgccgcgtcgctgataccggctttcgcagcaaaaaaaaccgcgatccagcttggctgggtcgcggtttttttatgcgcggctattaatagtgaggcggcggcgcttcttcttcggaggtttcgaactggccgcccatttcttcctggcgtttgagcagcgcagtcatctgcagttgcaggcgttctaccgcacgctgctgggtgacgaggatgtcattgagggtctcgatggtgtcgtcctggaaggccaggcggctttccaagtcggtgacgcggtcttgcagatccatgattcagccctggttaaatatgaagtcggcgggcaacagctcgcgcagacgggcgcggatggcagcgacttgctcatcggtgtaaggctgcgccggatgtttgccccataccggcgccggccaggcagcatcgtcgcgcttgcgcacgatcacatgcacgtgcaactggctgaccacattgcccagggcgccgatgttcatcttgtcggcggccaagccttcattcagcaactgggccaaggccgtcgtctcttgccacaaacgctgctggtcggcgacatccagttgaaacacttcgctgatagcgttgatgcgtggcaccaggatgaaccacgggtagttcgagtcattggacagcagcaggcggcacagcgggaagtccccgatgaccagtgtgtcttgttgtaggcgttgatctagggcgaacaccgcgggcactccgttcggcaagtcaggttcaggcgcccagcataccttcgaatgcgcccggcttcacggcgaatgcaggaaagcgccggcgccaatgatgaaaaagcatgcactctttcgaggcgggcgaatatttgagctacgctaaaccgggcctcaccgggacgcaccaaaatgacccacttgtgcttcaaagggatccgccaattacccactcatgggggtgaaccggtaacgtttttccctcgcacaggttttatgcaccaccgaagaggggtaacaccgccgcgtcaagcccaaaccaaacggcgtaaaaagcccgtgcttatgcggtttttacacgcccgcaagggttttcacgaaaaaatgacattcggttaccgctttgtgcacgcttgttgcattgacacctgcatcgtcggcaacgacacctgaatggaagcaggtgtttcgcgaaaaaaaaacagcagcgtttcaatgcgtatcaaggaagtgttcaaactttgaaaagggtttggaaacagtattgaagttgtcagtccggttacaacaggactgtgaatttgcgacatggagctagcaatttacgacagcctcgtaaagaagctgaaaggatagatgggtaagtatcgtcaatagggtctgcgtgatataactttgcgccgacacataaaagaaagagccgcccagataaaaatacaggtgggacggcagtactcttcctaaaaccaaaggagcaaatcacgatgcgcgtgatgaagtggagcatgatcgccctggctgtttcagcaggcactacgcagttcgcaatggcgtccgcccaaagcgattccaaaggctttgttgaagacagcactttcagcattaatactcgcgctctgtacttcagccgcgacttccgcaacaacccgtcgggcccaggctcccagagccgtgccgaagaaaccggcctgggcttcaatgccctgtacgaatcgggcttcactcaaggcaccatcggtgtcggtgttgatgtgattggcctgttgggcgtcaagctcgacagcggcaagggccgtgcgggtaccggtctattcccaacgggttccgacggtcgctcgcaagacgactactccaaaggcggcggtgccgttaagttccgtatctccaatacggtcctgaaagtcggtgaccagtacactacggctcctgtgttcgcctctgacgacagccgtttgctgccagagctgccacaaggtatctcgatcaccagtaacgagatcaagggcctgaaactggaaggcggtcacttcacttccagcattgcgcagaaccagacctatcacgacagccttggcttgaccaaaaccgattttgtcggtggtgtctactcgttcacgcctgagttcaccggcagcctgtactacgcgaagaccgaagattacttccgcaagtactacagcaacctgaactggacccacgcactgagcgacgaccagtctttcgccttggacttcaacatctacgacaccaagagcgagggcgaaggcctgcaacgtgcttccaaagacagcgctctgccgttcgcacaacgcaccaagctcgacaaccgtgcgttcagcttgcagggtgcttacaccatcggtgctcacacctttactctggccgcccagaaagtcaccggcgacggcgactacggctacggcgtagacggcggcggcacggtattcctggccaactccatcgcccgttccgacttcaacgccgaaggcgagaagtcctaccaggctcggtacgatatcaacatggcgacctttggcattcctggccttagcttcatgactcgttatgtcaccggtagcggcgccaacactgccaccacttcgaacggtaaagagtgggaacgtgatatcgaagccaagtacgtggtacagagcggcccagcgaaaaacctgagcctgcgtctgcgtcaagccacctatcgttcgggtgatggcgtttactacggttcgccttcgatcgacgaactgcgtctgatcgcgaactacccgctgaacatcttgtaactgctcgttcgattacaacgatggcttaaggcttcggccttaaataaaaagccgccccccttgcaaacaagagggggcggcttttttattaccgtttaatttcaatcgaaaaataactagcaagctaactaacgagattaacccgtcgaccgtgaacctgaccttttggccaagttcaatgccattgaccttagttacttcgtaacactttcctgcatcacccgaataacccgctgcggaaatggaatatcaatccccgccgcttttaaacggtcacgtgccagttcgttcaacatgaacaccacatcccaataatccgcggtcttggtccagcaacgcagggaaacggtgatcgaactgtcacccaaagtcgaaaccaccgccacggcagccggatcggccagtacacgtggatcttttgccagctccagcagcacttcacgggctttctgcaggtcagcttcatagtccacacccacatcaaacaccaccttgcgggtcggctgacggttggtgttggtgattaggccgttggacaggctgccgttagggatgatcacggtcttgttgtcgccggtgcgcagcacggtatggaagatctggatgctgtcgacggtacccgaggtgccttgggcttcgatccagtcaccaatgcggaacgggcggaacagcagaatcagcacgccgccggcgaagttcgccaggctgccttgcaaagccaggccaatggccagggtcgcggcaccaattgcggccacgaacgaggtggttgccacgccgatcatcgaggccacgttgaccaccagcatgactttgagcgcgatgttcgccaggctggtgatgaagtgttgcagggccaggtcagcattgcgcagtgccagcaaacggcccactcgatgggtcaacacgttgatcagccaccaaccgatggccagggtgaccactgccagcaaaaaccggctgccgtattccatgatcatcggcagccacgactctgaggtcttgatcaagtgatccacttcagcattgaaatccatctacattctcctggttaccggatgttcggcgtatcgagtggccataaatgcaattgagccccgaagggctcaatagtaggcgcaggttgtggggcgtgggacgtcaaaaacgcccgcaggttccccaatgtgccatcagtcgcggaagttattgaactgcagcggcatgtcgaaggtcttggcgcgcagggccgcgatggcttcttgcaggtcgtcacgcttcttgccggtgacgcgaacctgctcaccctggatcgcggcctggactttcagcttggcgtccttgatgtgggcgacgattttcttcgccagctccttgtcgatgccttccttgaggatggcttcctgcttcatcagcttgccggaggcgtaggcgtccttgatttcaaggcattgcgcgtcgatcttgcgcttgaccagcgacagcttgaggatctcgatcatcgcttccagctggaaatcggcttcagcggtcaggttgacggtcagctctttttccttgaactcgaagctgcccttgcctttcaagtcatagcgacggtccagctccttgacggcgttttcgacggcgttggtgacttcgtgtttgtccagttcggataccacgtcgaacgaaggcatgtcatatctccaatataaggggcgggctcagtagagatggagcgcgcccaagctaaaatgccggggcattatagcggttcttttgtcccgttcgctgcgggcgaccctacggagcaaaaactgatgtcgaccacctggcatattctcggcgccggcagcctgggcacactttgggcgactcgcctggcgcgtgctggcgtgcccgtgcggttgatcctgcgcgatgaagcgcgcctggccaactatcagacagccaaggggctgaccttggtggaacaaggtgtagaacacacttacccggtgacaggcgaaacatccgacagtcctgggctgattcatcgcctgctggtggcgtgcaaagcctacgacgctcaagcagccgtcgcacagttgcaacatcgactggcgcccgatgccgaactgatcctgctgcagaacggcctcggcagccaggacgcagtcgccgcgcaactgccccaggcccgctgcatcttcgcctccagcaccgaaggcgcgtttcgcgacggcgactggcgcgtggtgttcgccggccatggctacacctggctgggcgatgcaggccacccaaccccgccgctgtggctggaggatttgcaagccgccggcatcccccacgactggagcaccgatatcctcacgcggctctggcgcaagctggcgctcaattgcgccatcaacccgctgaccgtgctgtatcagtgccgcaatggcgagctacaggcccaccagtgcgaagtcgccaccctgtgcgccgaactcggcgaactgctggaatgctgtggccagcccgccgccgcgctggacctgcaacacgaggtggaacgggtgatccaggccaccgccgccaactactcctccatgtaccaggacgtggccgcaggccgccgcaccgaaatcagctacctattgggctatgcttgccaggcggccgcccgtcaccaactgaacctgccgcaccttcaacagctgcaagtgcgcctggtcgagcagttgcttgcacgcggattgccccgcgactgagccacgcgctaccctgcccgcctgtctatcacctgggaaaaccctgatgccgctgcgccagcgtcttgaaaacctaccggtcgggcagaaactgctggccgccctgctggtgctgttgaccaccgtactgctggtggccaacctgacctttatcagcgccgcctactggatctcccaggaaagcatggcgccccaggccttgcaggccatcggccgcctggtgtccaaccctgcgctcgccgccgaggccctcgaatcgccggccaaggccgacgcattgctcaatgagttgaccagctattcgccgttgcgcgccgccgctctgtacgacggcgacggcaaccgcctggcgcagatgcaacacggcgaccgcctgcacctgcccgatgactaccggcacatcgaggcctggcgtgtcaccgagtttcgcagcaaccaggtcatcaccctgccccgcgccggccaaccgtccgggcatttgctgctggtggccagcagtgagctaccagtggcgttctacaccggcacattgactgccagcctgggcatcctgattttcagcgtactgttgtggctggtcatcgcccgtcagatcaaacgcctgatcacgcggccgatccacgaactggaagaactgtcgcgccaggtcactcgcgaagagaactacgccctgcgcgccggtcgtggcaaccacgatgaaataggcagcctggccgaagccttcaacacaatgctgtcgcgcatcgaagcccgcgagcaacagctcaagcgcgcacgggacgactcccaggcggcctacgaccaggcccagggcctggccgaagagacgcgccacaccaaccgcaagctggaactggaagtccaggtccgtagcaagatcgagaagaaactcaccggtttccagaattacctgaacagcatcatcgactcgatgccctcggcattgatcgccctggatgaacagctctacgtcacccaatggaaccaggaagccagcgccctctccggcacacgcttggatgaagctttgaaccagccgatctacctggccttccagccgctcaagccttacttgccgcagatcagggcagcggtcgaacaacacacggtggagcgcatcgaacgcgtcaactggttcaaggatgacgaacccaaacactacgccctgaccttctacccgctgatgggcggtgccggacgtggcgtggtaatccgtatcgatgacatcacccagcgcctgtccctggaagaaatgatggtgcagtcggagaagatgctttccgtcggcggcctggccgccggcatggcccacgagatcaacaacccgctgggggcgatcctgcataacgtgcagaacatccgccgccgcttgtcgcctgacttgccgaagaacctggaacacgcggaacaggtgggtatcgagttggagaccgtcaaccgctacctgcaaagccgcgaagtgccgcaactgctcgatggcatccagcaggccggggcgcgggcggcgaagatcgtcacccatatgctcagtttcagtcgccgcagcaaccgacagatggcaccttgcgacttgccggcattgatcgaccaggcggtggagattgccggtaacgatttcgacctggccatcggctttgacttcaagggccaggcgatcatccgccagttcgacccgcaactgggtccggtgccaggcaccgccaacgaactcgaacaggtcctgctcaacctgctgaaaaacgcggcccaggccattcacctgcgggaagacgacagcgaaccggggcgcatcatcctgcgtacgcgcctcaacccgccgtgggcggagatccaggtggaagacaacggcatcggcatgagtgaaaacgtgcgcaaacgcaccttcgagccgttcttcaccaccaaggaaatcggccagggcaccgggctagggctgtcggtgtcgtatttcatcatcaccaataaccacaagggccagatggaagtgcactccaccctcggccagggcacctgctttaccttgcgcttacccctggccggcagccaactgccgccttacgaactcacccaactggagcaatgaccatgggctttcgcctgtcgaagatctacacccgtaccggcgacaaaggcgaaaccggcctgggcgacggccgccgtgtgcccaaggatcacccacgggtggaggccatcggtgaggtggatacgctgaacagccagttgggattgttactggccaatcttgaagaacagagcggcaaacatccggaactgaaggatgtgatcgaggtgcttacgccgtgccagcatcgcttgttcgacctggggggcgagttggcgatgccagtgtacaaggcgctgaatgcggcggaagtggatcggctggaagcagcaattgatcgctggaatgaagaagtgggatcgctagagaacttcatcctgcccggtggctcggcgttgatcgcccaggcccacgtgtgccgcagcctcgcgcgcagtgcagagcggcggtgccagcagttgaatgcggtcgagccgttggaaggcgtggggttggcgtacatcaatcggttatcggacttgttgtttgtggcggcgcgggtaattgcaaggcgccagggcgttgctgaggttttatggcaggctgccgctaaaccccactgattattcagcgcctgatctgacgccttcgcgagcaagcccgctcccacatttgaccgcattccaacggtagaactcggtcgaatgtgggagggggcttgcccccgataaggccggtcagaacagcctcaaatctcaggccagaacgcgcgaatccctgccacaccttgggccccagcctcccaagccttctcccgctcggcgggtccaaccccgcccaacagaaacaccggcttgctgaacccggcgatcaacgccgctacctgctcccagcccaacggctgcgcatcaggatgggtctgggtcggctgcaccggcgacagcgtgacaaaatccacgtccatcatttctgccagtgccaactcctcagcgttatggcaggaagcagccagccagcgatccttcggcagcggacgccccttgctggcgtacttacgcagttgcgccgaggtcatgtgccaaccggccgcaggaaaatcccccagccattcaaacggccccttgagcatcaactgggccttgcccgcgcacaggcccaccgcatccaccgcaaggtcgcggtatttggggtcgtagccgttgggcgcacgcagttgtaccaacttgatgccgccagcaatggctttctggataccccgcagtaacgtcggggtttccagttcgcccggggtgatcaggtactcggcaggcaagcgcgcagccgcaacgatcggcgcgttggccgccgggaactcgtagttgagcagctcccgaggcgccacccattccagcggttgcccttcggcgccatggggctcaccggtaaacgccgagacttcccagacatccagcaacacctgtttgtccggatagtcatgctgcaccttgatcagcggccgcgccgtggtgacctcgatgcccagctcttcctgcaattcgcgggacagcgcgccggcgaccgattcatcggcttccaccttgcccccggggaattcccagaggccgccctggtgctgggtatcggcgcggcgcgccagcaggattttgccgtcgacaccgcggatcaccgctgctgctacatgcactcgtttcaccgcgcttatcctcttaggtacggtattccgcgttgatcttcacgtactcgtgggacaggtcggtggtccagatggtttcgctgcactcgccgcgacccaactcgatacggatggtgatttcttcctgctgcatcaccgccgaaccctgggcttcggtgtaggtttcggcacgggcgccacggctggcgatgcacacgtcgccgaggaacacgtcgatcttgctcacatccaggtctggcacaccggcacgaccaacggccgccaggatacggccccagttcgggtcagaggcgaacagcgcagtcttgatcagtggcgagtgagccacggtgtaacccacgtccaggcattcctggtggttgccgccgccgttgacttcaaccgtgacgaacttggtggcaccctcgccgtcacgcacgatggcctgggccacgtccatgcacacttcgaataccgcctgcttcaacgcggcgaacaacgggccgctggcctcggtgatttccggcaggttggcctggccggtagcgatcagcatgcagcagtcgttggtcgaggtgtcgccatcgatggtgatgcggttgaacgacttgttggcaccgtccaggatcaggctgtgcagcacgtcgcgggagactttggcatcggtagcgatgtagccgagcatggtggccatgttcggacggatcatgcccgcgcccttgctgataccggtcacggtgacagtcacgccatcgtgcacgaactggcggcttgcgccttttggcagggtgtcggtggtcatgatgccggtggcggcggcggcccagttatccacagacaggtcgtccagcgcggcttgcagcgcgccttcgattttctcgaccggcaacggctcaccgatcacaccggtggaatacggcaggacctggctggcgtccacgccggtcagttgggccagcttggcgcaggtgcgcgcagccgccaccaggccaggctcgccggtgccggcattggcgttgccggtgttggtcagcaggtagcggatcgtaccggccacgcgttgcttggccagaatcaccggcgcagcgcagaacgcgttgagggtaaacacaccggcgacggtcgagccttcggcgcaacgcatcacgactacatccttgcgcccagggcgcttgatgccggccgaagcgataccgagttcaaaaccggcaaccgggtgcaacgtgggcaaaggaccaagaccaacagccatgaatgcgctccttaaaaatgggtgatgtctgtgccgtcgtgagcgacggtgaaattaatggcaaaacgccgcgacggcaggagccggtcgcggcgcagggtgttgcagcgtcaggcgaaaatcttattcgatctggccgtggcagtgtttgaacttcttgcccgagccgcaatagcacagctcgttgcggcccagcttctgttcgttgcgcaccgggctttgagccagggccacatcgacctcctcacccaatacctcaggcgcttccaggcctggcgcttcgtcgtgctggaactgcatgcgcgcagccagtgcctcggcttcctgacgcaggcgagcttcttcctcgatcgggtcttcgcgacgcacctgaacgtgggacagcacgcggatggaatcgcgcttgatcgaatccagcagctcggagaacagcgtgaacgactcgcgcttgtactcctgcttcgggttcttctgggcgtaaccccgcaggtggatgccgtgacgcaggtggtccatggtcgacaggtggtctttccacaggtcgtccagcacgcgcagaacgatttgcttctcgaaggtgcgcagtgcttcggcactcgcctgctcttctttctcgttgtacgcggccagcaattcggccatcagtttttcacgcagggtttcttcgtacaggtggtcgtcttcgtccagccactgctggactggcaagtcgacaccgaagtcgctcttcaacgccgcttccaggccggcaacatcccactgctctggcaaggactgtggcggaatgtgtgcgctgacggtggcgttgagcacgtcctgacggaagtcggcgatggtctcgccaatgttgtcggcggccagcaacgtgttacgcatgtgatagatcactttacgctgttcgttgttgacgtcatcgaactcgagcagttgcttacgaatatcgaagttgcggccttcaaccttgcgctgggccttctcgatggcgttggtcaccatgcggtgctcgatcgcttcgccggactgcatgcccagggccttcatgaagttcttcacgcggtccgaagcgaagatgcgcatcaggctgtcttccagggacaggtagaagcggctggaaccggcgtcaccctggcgaccggcacggccacgcagctggttgtcgatacgacgcgattcatgacgctcggaggcgatcacctgcaggccaccggattccagcacggcctggtgacgcttctgccaatcggccttgatctgggcgatctgctcagggctcgggttttccagggccgcgacttccacttcccagttgccgcccaacaggatgtcggtaccacgaccggccatgttggtggcgatggtcagtgcgccagggcgaccggcctgggcgatgatctcggcttctttttcgtggaacttggcgttgaggaccttgtgctcgatgccttccttattaagcaggttggacacgtgctcggaagtctcgatggtagcggtgcccaccaggatcggacggccctgggccataccgtccttgatgtcgttgatgattgccgcgtatttctcttcggccgtcaggaacaccaggtcattgaagtctttacgcgccaaaggcttgttcggcggaatgaccatcacagacaggccgtagatctggtggaattcgaacgcttcagtgtcggccgtaccggtcatcccggacagtttgttgtacagacggaagtagttctggaaggtggtggacgccaacgtctggctttcagcctggatgttgaggtgctccttcgcttcgatggcctggtgcaggccctcggacagacggcggcccggcatggtacgaccggtgtgctcgtcgaccagcacgacctggccgtcctgcacgatgtactcgacgttgcgatggaacagcttgtgggcacgcaggccggcatacacgtgggtcaacaggcccaggttgtgcgccgagtacaggctttcaccctcggccaattcgccgatctgggtcagcatctcttcgacgaactggtgaccggcttcgttgagttcgacctggcgggtcttctcgtcgatgctgaagtgaccttctttggtcaccacgccttcgacttcctcgatgtgctgctccagacgcggaatcaacttgttgatttcggtgtacaggcgcgagctgtcttcggcctggccggagatgatcagcggggtacgggcttcgtcgatgaggatggagtcgacttcgtcgatcacggcaaagttgagttcgcgctggaatttttcatccatgctgaacgccatgttgtcgcgcaggtagtcgaaaccgaattcgttgttggtgccgtaggtaatgtcgcacgcgtaggcagcgcgcttctcttccggcggctggaatggcgtaacgacgccaacggtcaggccgaggaattcatagagcgggcgcatccagttagcgtcgcggcgggccaggtagtcgttcaccgtcaccacgtgcacgcccttgccggacaatgcgttgaggtaaacgcccagggttgccaccagggtcttgccttcaccggtacgcatttcggcaatcatgccttcatgcaaggtcatgccgccgatcaactggacgtcgaagtggcgcatgcccatgacacgcttaccggcttcacgggcgaccgcaaaggcttcgggaagcagcttgtcgagggtttcacctttggctatgcgggccttgaactcttgggtcttggcgcgcaattgctcgtccgaaagggcaaccatctgctcttcgaaggcattgaccagctgcaccgtcttgagcatgcgtttgacttcgcgctcattcttgcttccaaaaagtttctttaacaaaggcgcaaacatatcggcaggttcttccacacatagggatggagggcgcaccgtgagtggcccgagcagccctcacggccgcatgcgaacgcgcattctacccggaatcgtgggtgaggaaagtggcgttattccccgatgctggcatggtgctgtgagagggcctgtttaaaataagggcttttaccggaacttcaacccatggagcgcagaagttaccgattgatttcacgcacaaaagcccatggatgctttgcctggggagatgcagacgctttctgctaagatggcggctctgttacttaaggtgtccaacaatggcatttcgcccctcgccagcccgcgcgcctgccgtgttgcttcgcgatgccaagccgctgaaagccatctttggccatgcgcaacgcctgggccatctgcaacgcctgctcgaaagccaactgcaaccggccgcgcgcgaacactgccgcgtggcgtcctggcgtgaaggcaacctgctgctaattgtcacagatggccactgggcgacacgtctgcgttatcagcaaaaacgcctgcaacgtcaattgatagcgtttgatgaattcgccggtttgacgcgcattcagttcaaggtacaaccgcccaccaccctgcctggcgtggtgcagcacactcatgacctctcgacgaatgccgccgaaaccattcaggcaacggccgacgggatcagcaacccggccttgcgcgcagcccttgagcgactggcagcccacgccaggcccaagccctgagtctctatttgcgcttgctgccgcccagtaacgaccccaacaaaccacgtaccagttgccgccccatctgattggcggcctgctgcatcgccgatttcagcgccttgcctgccgtggtgcccagaaacgcaccggccctgtcggtaaaactcggctcgtcggtagtcggcttggtctcttcggtcgggccaagctccttgcgtgacatcagcacttcgtaagcggattcccgatcaatcggcttgtcataacggccttgcagcggcgaactggcgaccaacgcggcgcgttcggcttcgctgagcggcccgatgcgtgattgcggcggagcaaccaaaacgcgatggacgacttccggcgtgcctttttcctgcaaggtgcccaccaacgcctcacccgtgcccagctcggtcagtaccgacaaggcatcgaatgctggattgggccgaaacccctccgcgacggcacgcagggatttctgttccttggtggtgaacgcccgcaagccatgctggatacgcagaccgagctgggccagcacgctgtccggcaggtcgcccggcgattgagtgacaaaatacacaccgacgcctttggagcgaatcagccgcaccacctgttccaggcgctcctgcaaggccttgggcgtatcggcgaacaacaaatgtgcctcatcaaaaaacagcgccagcagcggtttttcggcatcaccacgctcgggcagttgctcgaacaactccgccaacagccacagcaggaacgtcgcgtataccttcggtgcctcgtgcaccagacggctggcgtccagcagatggatgcgcccgcgtccatcaccagtgggctgcaggatatcttccaactgcagggccggctcaccaaacaaggcttcagccccctgttgttccagcaccgccaggcgccgcaagagggcctggctggatccggtggtcatcagcgctgcgtcttcgcccagcaattccgggtgatagcgcaggtggttaagcagtgccttgaggtccttgaggtccagcagcagcaagccttcgcgatccgccaccttgaacgccgcgtaaagcgctgactgctggctgtcagtaagttccaacaggctaccgagcaacaacgggcccatttcgctgatggtggtgcgcaatggatggccggactgcccgtggatatcccacagcgtgaccggataagccttggccgtgtaattcaggaaaggcatgccggcgatgcgctcggcgaccttgccttgcggattcgccgcagcgccgagcccgcataggtcccccttgatgtccgcggcaaacaccgccacgccggcgtcactgaaggcttccgccaggcgttgcaatgtaacggtcttgcccgtgccggtggcaccggcgatcaacccgtggcgattggccaaccgcatggcctgggcgatgggctggccggaaaggtcggcaccgataagcagttgcgaggagtcaggcatttcgtcacccatggttaatctttagtgtcgccaagtcgatacaggcagatgtaagacccacaaagtctaaaaataggtcagatagttcctacagggaccaccggagctatcacaagaagtatcacaccttttttgacgctgtcattttgcgcatcccacaaggacgcgctttggatattaagaccttagcggaccctacaagccatgaataaaaatctgcgcttcagccacaaaatcctgcttgcagcctcccttatcgtcatcgcggctttcgcgctgtttaccctttacaacgactacctgcaacgcaacgccattcgcgacgacctcaacaattacctgcatgaaatgggcgacgtcaccgccagcaatattcaaacctggctcaccgggcgcattgccctggtggagaacgccgcacaaaacatcgccatcaaccccgagccttccgcagttgccagcctgctggagcagaaaaccctgacgtcctcattcatggcgacctacgtcggtgacagccagggcgcctttaccatccgccccgacaccaagatgccggacggcttcgacccgcgtgtgcggccctggtacaagggcgcccagagcagcaacggctcaaccctgaccgaaccctatatcgatgccgccaccggcaagttgatcatttccgttgccacccccagcacccggggtactcagagcatcggcgtagtgggcggcgacctgagcctgcaaaccctggtggataacattggcgcgctgaacttcggcggcatgggctatgcgtttctggtcagcgccgatggcagagtattggtacatccggataaaaacctggtgatgaagaccctggccgatgtgtatccgaaaaatacgccaaaaatcagcgccgatttcagcgaagtcgaggccaacggcaaggccaacatcgtgaccttcataccgatcaagggcctgccttcggtgaactggtacctcggtatttcagtagataaagacaaatccttcgccatgctcagcgagttccgcacctcggcggtcatcgccacggtgattgcggtggtgatcatcatcgccctgctgggcatgctgatccgcgtattaatgcaacctttgcacgtgatgacccgcgccatgcaggacatcgccgatggcgagggggacctgacgcgccgcctgaccatccagaatcacgatgaattcggcacgctgggtaacgccttcaaccgcttcgtggagcgcattcacacatcgatcagcgaagtgtcctcagccaccgaacaggtgaatgaggtagcactacgggtggtcagcgcgtccaactcgtcgatggtcaactccgacgagcaggccaaccgtaccaacagtgtcgccgccgccatcaatgaattgggcgccgccgcccaggaaattgcgcgcaatgccgcgcaagcctcccatcaggccagcgatgcccggcacctggctgaggacggccagcaagtggtcgagcgcaatatcaaggcgatgaatcagctttcagcgatgatcagcgcgtccagcagcaatatcgaagcgcttaacagcaagacggtgaacatcggccagattctcgaagtgatcaccagcatttcccagcaaaccaacctgctggcactgaacgccgccattgaagcggcgcgtgccggggaagcgggccgtgggtttgcggtggttgccgatgaagtgcgcaacttggcgcatcgcacgcaggagtccgcgcagcaagtgcagaagatgatcgaggagctgcaagtcggcgcccgggattcggtcagcaccatgagtgaaagccagcgccacagcctcgacagcgtggacatcgccaacctggccggcgagcgcctgaacagcgtgacccagcgcatcggcgagatcgacggcatgaaccagtcggtcgccactgccacggaagaacagacttcagtggtggagtcgatcaacatggacattaccgagatcaacaccctcaatcaggaaggggtggaaaacctgcaatccacgctgcgagcgtgtgccgaccttgagcaacaagcggcacggttgaagcagttggtcggtagtttccggatctgatcaggagtcctcaggctcggacttggcctgctcttgctcccacaactcggcggcaccgggaaattcggtgccgtcctcgctgctcaggtcatccgggtcatatcggctcaaacagccctcccctaaggttgccggggcttttgacgtggctttgtccaacggatcattcatcgctcaatcctcaagggcacgcaaagaaaaagggcccggaacgatttaacgcccaggcccttcattcttcaatcacaacaggtcggtcagaacaccaccgtcttgttgccgtgcaccagcacgcggtcttccaggtggtagcgcaggccacgggccaggaccatcttctcgacgtcgcggccgaaacgcaccatgtcttcaatgctgtcgctgtggctgacacgcaccacgtcctgctcgatgatcgggccggcgtccagctcttcggtgacgtagtggcaagtcgcgccgatcaacttcacaccccgcagggaagcctggtgatacggcttggcccctacgaacgacggcaggaagctgtggtgaatgttgatcaccttgccggcgtattcgcggcacagttccggcggcaggatttgcatgtagcgcgccagcaccacaacgtcagcctcgtgttgcttgaccaggcgggagacctcggcgaacgccggctccttgtcctgcgggttgaccggcacgtggtaatacgggatgccgtgccactcgaccatgctgcgcaggtcgtcatggttggaaatcacgcaagcgatctcgcagtccagctcatcgctgtgccagcggtgcagcaaatcggccaggcagtgggattcgcggctggccatcaacaccacgcgctttttctgctcggtgtcggtgatgtgccaggtcatcgaaaactcttcagcgatcggcgcaaacgcttcacggaaggcatcaagaccaaaaggcagcgaatcggcacgaatctcgtgacgcatgaagaaccaaccgctgagattgtccgagtgatgactcgcttcggtaatccagccgttgtgggaggccagaaagttactgactttggcaacgatgccgacccggtccgggcaagcaatcaccagccgaaaagtgcgcattagggggaaactccagaacttcgcaaaggccgccattctagcgattgcgcaggaaaactgcagtattcgttaacgtttattctgatcgccggccccagctttgtcccttaatagcctatggttttaccacccttatatgaatctgtgcggcataccacggctgttcccgcttttccaagcagattatctttgggtctacgccctagtaattaactcgaatgcatagcattgctacaaacattcaaagtaattcacataaatgcgagcttaaatgtttacttgaggaaaccgcctgactattattgggccactatccctgtcaatcagcgctctacataaggtagtccacatgtctctgatcaacgaataccgtgccaccgaagaagctatcaaagagctgcaagcccgtttgaagaacctgtcccaagacgacaaactgcaaaccgagctggaattcgaaggtaaattgcgtgccctgatgggtgaatactccaaatccctgcgtgacatcatcgcgctgctggatccagagtcgaaagttaaagctccacgcggcgccgtaaaaactaccggtaccaagcgtgcccgcaaagtcaaacagtacaaaaacccgcacaacggcgaagtgattgaaaccaaaggtggcaaccacaaaacgctgaaagagtggaaagccaagtggggcggtgacgtggttgaaggttgggctaccctgctgggctaagcctcatcaggtttgcgcctgacccgtgacacattaaaaacgccagcttgctggcgttttttattgtccgcatagtctgcgaaaaccgactacagattcattctggtcgctagagcgtccgcatactcctgccattggtccagcacctgagactggaacggtgtagcactaacagcaaactcaagccgagcctgtttaaacgcatcaagggtattcggcgcgccccattccgggctcgacaaacgttgctgacagaaaagtttccagcgcagttgctcctcgctgttcaacgtatcggggaagttgcgcgctcggtagcggaataataattcaggcaaacgctcgtcatcaaaaggccactgctggcgcgctaattgcgcaggctcagcggtccggacttgttcacataaacgccggtcacggtctccgataaaaccgccgtaaagctgttgctcaggatccgaactcggcgtgaagtcttcgtgcgcgtaaatggccgccaacttatcgcgccaaagttcctgtgcgtcagttagccgcagcgcccgttcctgaaaaatattcatgtccaagtgcagacgctcacgatcttctgcgcgcagcacattcaagggcgccaccacggggcagcggttgatatgcaccaatttgagggggaccggcaattcaccgtcggcgagatcatcacgacgggtatagaggcgctggcgcaaggcctcggcatcaaggtccagcagcccctgcggatcgagtccgaggtcacagacgatcaatgcattgcgattacgcggatgccatgcgagcggcagcacaacacccaggtaatgacgttcggcagaaaaacgcccggaaatatgcaccattggctgcagcagacgcacctggtccattacccgttgcttgctgcgcagctgaaacagccattcatacaacttgggctgtttctcacgtaccagccgagccaacgcaatcgtggcacgcacatcggacaacgcatcgtgcgcctgaccatggtcgatcccattggcttcggtcagacgctccagcttgagcgtgacgcgcccatcctgctgcggccattcaatgccctccgggcgcagggcgtaggccgtgcggaccacgtcgatcaaatcccagcgactgttaccgccctgccattctcgtgcgtaggggtcgaaaaaattgcgatagaggctgtagcgcgtcatctcgtcatcaaaccgcagcgtgttgtaaccggcaccgcacgtaccgggggcggccagttcagtgtgcacccgagtcatgaagtcggcctcggccaagcctttttccgcgagtattacgggcgtgataccagtgatcgcacacgcgatggggtgcggcaggatatcgtcgctgggctggcaatagagattgaccggcgagccgatctcgttgagttcgaggtcggtacgaatgccggctacctgaagcgggcgatcgctgcgcggattgatgccggtggtttcatagtcgtaccagaaaatggaggtcacgggttgttcctgtactgaagatcgacaaagtctaggcgctgaaaggcttccgcgaccagcaccaaatacactgtacaaacatccagcaaactcttgaatggttgcttccatccccgacactgctagcatccgtgtcttccagccactctgcactgccaaggatcgcgatgccgtcagccccattggacacccgctaccagatcgagaccccggagggcatcgacctgcccctgcgtccggccggcctggtgccgcgcgtgctcgcctttgccttcgacctgggtgtacgcggggtgatcatgggcgttctgttggtgccattggctttgcttggcaacgtcgggatcggcctgggagcgctgctgctgtttttgatcagttggtggtacatggtgctgttcgaggtgctcaaccagggttgctcacccggcaagcaggttatggggctgcgtgtcgtacaagatgacggcactccgattggctggtccgcttcactgattcgtaacctgctgcggtttgtggacatgctgccgttcggctactgccttggcgcgatcagttgcctgcagcacccccacttcaagcgcctgggcgacctggccgccggcacactggtgatctaccgggaacaaccgctggtacggccccagattcctcaagcaacagccctgcgcttgccctttgccctggatttgagtgaacaacgggcgatccttggttttgcggaacgccaaggggaactgtccaccgagcgtgttcacgaattggcctcgattctcgccgcgcccttgcaggtatcccccgaccgcgctgcggaacaactcaatggcgtggcccgcggcctgctggggccgacatgaaacagagccttttcgaaagccgtcaccaacgccaatggcaaaccttcgccgagcagctcacacagttggagcaagggcaggccaaagccgctgaagtggccgatttccctcatcaatatcgacgcctgtgccagcacctggccctggcccaggaacgtggctacagcagctacctggtagacccattgcaacaactggccctgcgcggccaccaacaactctaccgtcatcgcagccaactggcggcgaatgcgctgagctttgtactcgccgattttcctcggctggtacgggaacagtggcgtttcgtgctgatcgccagcctgctgttcttcggcagcctggtgggtattgccctgctggtctacctgtttcccgacctgatctacagcatcgtcagcccgcaacaggtggccgagatgcaggccatgtacgaccctgatgcaagccgcctgggccgcgccgccgagcgtgcatcaagtgaagactggatgatgttcggctactacgtgatgcacaacatcggtatcgcgttccagacgtttgccgccggtttattgttcggcctgggcagcgtgttctttctgattttcaacgggctcatcatcggtgcggtctccggtcacctgaccgagatcggctatggccagaccttctggtcattcgtcatcggccatggcgcattcgaactgaccgcgatcgccctcgccggtgccgcaggcttgcagttggggtgggcactgatcgcccctggacaactgacccgtggtgaatcattgcggctggctgcacgcaagagcgtgcgaatgctgtgcggtgtcatgctgtttctgctgatcgcagctttcatcgaggcatattggtcatccaccaccgtgataaccccgtggatcaaatacctagtgggcgctgttctgtggctgctggtgggcacttacctgggctttgccggaaggaatcgccatgcgcctgactgatgccagtgtggtcatccggccgcgtactgcctgggaagccatggatcttggcgccttgatggcacgggagcatcgcgtgctattgatgggcagttgggcgttagtcaccctacctgtgttcgccttgcttacagccctgctgtggcagtatccgtccaccgccatatttcttttctggtggctcaagccggccttcgaccgcttgccgctgtacattctgtccaaggccctgtttggtgaaacgcccactatcaagcacgctgtgcgccagtggccgcgcctcctcaagggtcaactgctggccagcctgacctggcgacggttcagcctgagccgcagctttgtaatgccggttagccaactcgaaggcctggacggcccggcacgccagaaacgcctgggcgtgttgcagcaacgcaatgccggagccgcacgctggctcaccatcatcgggatgcaccttgaaatcggcctgtggttcggctgcatggcactgttctatctgttcatcccgcaaaacctcgagatggactgggactggcaacgcctgttgttggcgacaagctcggaagggttgtggctggagcacctgggcaacgcgttctatgccttgctcctgatattttgggaacccatctatgtcgcctgcggcttcagcctctaccttaatcgtcgcaccgtattggaagcctgggatctggaactggtattccgacgcctgcgtcaacgcctgagcaatgtggcaccgatgttgttgctgatgatcggactgatgctgctgcctctcagccttcccgtcatggccgatgcttccagcccctccaagccactgagcactccgagcgcgagccaatccatcaaatcgctgctggacaagccgcccttcaaaaacccggaaaccgtgacccgttatcggtttggagaagaaaagccagccggtaaaaacaaaacgcccaataacggcagacttcccgattggctgaaggccttgctggacaacctcaacagcaataccttcaagcacatcgcccaaggcctggaaattctgctgtggagcgtgttcattggtagcctgatcatgcttgtgtggcgctatcgcgagtggttgcgcacctttgtcagcagacgcggaccgcgcaagacagaggttgtcaaaccgctgcccacgcagttgttcggccttgaactgggcaccgaaaccttgcccgacgacgttgccggcgccgccgaacacctatgggccacccaccccagggaagccctcggcctgctgtaccgaggcctgctcagccggttgttgcatgatttcaacctgccgttgaaagacgctgataccgaaggccaggtcctggcacgtgtacaccagttgcaacacccccaactgctggccttcagtgatgagctgacccggcattggcaaaacctcgcctatggtcaccacctcccagcgctccctgcccagcagaaactatgcagtgattggcgcgccctgttcagtccagggagcaactgatgaatcgtccattactgtgggtggggttattgctggcatgcctgcttggagcgggcggttactacgtgtggagcaaggcgattccctatgacgaagtggtggatcgtggtccttcgccggaggcactggccaatccctatctggcggccgaacactttctgcgtcaacaaggcctcaccgtggaacacgccaatagcctgaaacggctgggcaccctgccttccaaaggcaacagcctgctgctgctcggcgaacgcagtaacctgtcaccacgccaggtagaacagttgctggcgtgggccagatccggcggtcatttgcttgtggtcgccgaggcgctgtgggatgaagagacaggcaaaagcggcgacctgctgctcgatcgcctgcatattcaccagaccttgagtgacgagcctgaagaatctgccacttccgtcaagaagccctcgaagatgaaagccccggacctgaccaagctctatgtcgacaatgaaaccgcatcggcttacttcagtttcgacacagatttcaacctcaccgaccccaggcacctggctcaattttccgctaacagcgcgagggccagccacctgatgcagcttgacctcggggaaggccgcgtcacagtgatcacggacagcgacctgtggaaaaccccgaacatcggaaagcacgacaatgcctggctgctctggtacttgaaccagggcaccgccgtgaccttgctgttcaacagcgatttcgacgacctgcttagcttgctgatgcgctatttcccccaagccctggtcgcactcgttgccctcgtcgccttgggactttggcgtgccggcgtgcgtcaaggcccgatccagcaccccgcttcccctgctcgtcgccaactgcaggaacatctgaaagccagtgccgacttcctgctgcgccgcagcggccaaggcacactgctgcagactttgcagcgcgatatcctgcgtgcggcccgacgccgtcaccccggctttgaacacctcgacaacgcagaacagtgccgggtgcttgaacacctgacgcgccaaccccctcacgtgatcaaccaggcccttggcccactcccggcaaaacggctttccagcgccgacttcagccggcaggtggcgtgcctgcaaaccctcaggaatgccttatgagtgatttcccaagcgccactgccttgacccgcgaatccctgcaacgcgccactgggcaagctcaagccctgcgaaccgagttgcgcaaggcggtgattggccaggacgcggtgatcgacgatgtcctgaccgcactcatcgctggcggccatgtgctgctcgaaggtgtgccggggctgggtaaaaccttgctggtacgtgccttggcacgctgcttcgagggcgatttcgcacgtatccagttcaccccggacctgatgcccagcgatgtcaccggccacgccgtgtacgacctgcacaccgaacaattcaagctgcgcaaggggccggtgttcactcatctgttactggccgacgaaatcaaccgtgccccggccaagacccaggcggccttgcttgaggccatgcaggagcggcaggtgaccctcgaaggcgaggcgctgcccatcggccaaccgttcatggtactggcaacccagaaccccatcgaacaggaaggcacctaccccctgccagaggcggaactggatcgcttcatgctcaaggtgcgcatggattaccccgacgcgcagcaggaactggacatggtgcgcgaagtcacacgctcgtcgcgggccgacatgctggatgtacacccattgcgcacggtgttgcaggccgaagatgtgctgcaactgcagcaggttgccagtgaccttgccctggacgaacaggtgctcgactatgccgtgcgcctggcgcgcgccacccgtaactggccaggcctggcgatcggtgctggcccacgggcgtccattgacctggtacgcggcgcccgcgcccgcgccttgttgcgcggtggtgagttcgtcacgccggatgacatcaaggaatgcgccctggcagtactgcgtcaccgcgtacgtatcgcgccagagttggatatcgacgggctggaggtcgaccaggtgctcaggcaattgctcgatcagattccggcacctcggcaatgactcgcctatgaagccgacccgtctgctgttgaactggctcggcgcattgctgggtctgggcatcctgctgggcactgcggcagcgttgcagctcacagtatcggacaccttgcactcactcgtctggggattactcctggcgttgttgctgttggccatgctggacgccgtacgagggcatcgccgcccctctccgcgtatacaacgacagatgcccggcagcctggcgttggggcgctggggcgaaatccgcctggccctggaccacgacttcccacagccgctgacggtgcaggtattcgatcatgcccccgacgggttgagcgtggagaacatgcctcagtccataaccttgtatcccggtgaacgctgcgaactgggctaccgtcttcgccccctgcggcgcgggcatttcagtttcagccgctgcgaagttcatctgcccagccccatggggctatggtctgcacgacgctatatcgaggtgaacgacaccacccgcgtctacccggatttcgcccgactgtacggcgcccaactgctgggcgtagacaactggttgagccaattgggcgttcgtcaacgccaacggcgtgggttggggctggagtttcatcagttgcgcgagtttcgcgaaggcgacagcctgcgccagatcgactggaaagctactgcccgacaacgcacccccatcgcccgtgaataccaggatgagcgcgaccaacaaatcgtgttcatgcttgactgcgggcggcgcatgcgcagccaggatgacgaactgtctcactttgaccatgctctcaatgcgtgcctgctgctcagctacgttgccttgcgccaaggcgatgccgtggggctgtgcacctttgccggtgaccagtcgcgctacctggcgccggtcaagggcagtagccagttgaacctgttgctcaatgcggtgtacgacctggacaccacccgacgcactgccgattaccaggcggcggcaagtcaactgctggcccggcagaagcgtcgagccttggtcattgtggtgagtaacctgcgggacgaggacgatgaagcactgttgactgccgtcaaacgcatcagtcgccaacataaggtgctggtggccagcttgcgcgaggaggtactcgaccaactgcgccatacccctgtgcaaaccttgcccgaagccctggcctacagcggcaccatcgactacctcaacacacgggatgagttgcatgaccgcctgagcgcgcacggtttgtccgtgctggacaccttgccctctgagctgggccccgcattggtgacacgctacatgggttggaaaaaagccgggaccctctgaggagaaaggttctgaaaagaaacactcgaccacggcagggcataaagcccctgaaccgggtcgagagcatgttgccgctaagccgaagcctgcaaaggatcaaaactgaagtaatgcaacaacacgttgatcaattgcccatactcctccggggcctgctgcacactgaacccggagtcgtaatgctgggggttgatatcttcgtgactccacaggcaggtagccgtgagatcaattggatggaaggtgccgtcagcctccggaatcttcaagcgcagctcgaaatccacgtcgaccatcatgggcaattggctgatcaacatcagcccatcttccgatacattgcccaaaaagccgatgggcttatcggtgagtcggttaaacacttgcaggaaataaggtagctgatgccgctcgatccgtcggtcggtaaacatggtgagatcgccatccagtggccataactgcggccgtgccagtgattcggaacgagaaaataacgcccgctctccatggatctcggtacgacaacaggcaatagtccgccgccagaacagctaccgaatccgggccccacattcgtttgcatggaaacttgtacaaacgaacatccaaaggatagcccaagactggcaacaggccagttatgaaatgacgaatatcatcacaacgaagcgggacgtggctgggcgacacttgcaccggggtaatgccccagctgctgcaaggtatcgagcctcgcacgagcacgataggcgtactcactcgacgggtactgattgatgatgaattgataggtctgcaccgcatcaacgaacagcttttgccgttccaggcactgcccgcgcaacatcgagacctccggctgcacatagcggcgcgtgcggctttcacggtcgacctgggataactccagggtgacacgctcgcaatcgccgaccttgtaggcacgataggcattgttcaaatgatggtccatcgaccaacgggtgcagccgacaacactgacggccagggcagcaacgagcaaaattcgcatgagggttctcctgtcttgtgcagtgtatcgacccctcgtcgaaaatcttcaaggatgttcgtattcagccgcagcgaaaacaagtcaatcatcgataagtagtgcaaacgaacaatgactacaacgaaagagcatagtagccttcctcagcgcttgaactcaggagtctgtgcatgtccgtccgtcgtaccaaaatcgtcgccacccttggcccggccagtaactcgccggaagtcctcgaacagctgattctggctggtttggacgttgcccgtctgaacttctcccacggcaccccggacgagcacaaggctcgcgccaagctggtgcgtgacctggctgccaagcacggccgcttcgtggcactgctgggcgacctgcaaggccctaaaatccgtattgccaaattcgccaacaagcggatcgagttgaagatcggtgacaccttcaccttctccaccagccacccgctgaccgaaggcaaccagcaagtcgtgggtatcgactacccggacctggtcaaggactgcggcgtcggtgacgaactgctgctggacgatggccgcgtggtcatgcgcgtcgataccgccaccggcaccgagctgatctgcaccgtgaccatcggcggcccgctgtccgaccacaaaggcatcaaccgtcgtggcggtggcttgacggcaccggccctgactgaaaaagacaaggccgacattaagctcgccgctgaaatggaagtggactacctcgccgtgtccttcccgcgcgacgccgccgacatggaatacgcccgcaaactgcgcgacgaagccggcggtaccgcctggctggtggcgaagatcgaacgcgccgaagccgtggccgacgacgaaaccctcgacggcctgatcaaggcttccgacgcggtgatggttgcccgtggcgacctgggcgtggaaatcggtgacgccgagctgatcggtatccagaagaagatcatcctgcacgcacgccgccacaacaaagcggtgatcgtggcgacccagatgatggagtcgatgatccagaacccgatgccgacccgcgccgaagtgtccgacgtggccaacgccgtgctcgactacaccgacgctgtgatgctgtcggccgaaagcgccgccggcccgtacccactggaagccgtgcaggccatggcgcgtatctgcgtcggcgccgaaaagcacccgaccagcaagacctccagccaccgtatcggcaaggtgttcgaaagctgcgaccagagcatcgccctggccgccatgtacaccgccaaccacttcccgggcgttaaagcgatcatcgccttgaccgaaagtggctacacgccgttgatcatgtcgcgcatccgttcctcggtgccgatctacgcgttcactccgcaccgcgaagcccaggcccgcgcggcactgttccgtggcgtgtacaccattccgtttgatccggcttcgctggcaccgaacgaagtcagccagaaggcaatcgacgagttggtcaagcgcggtgtcgtggagcaaggcgactgggtcatcctgaccaagggcgacagctaccacaccaccggtggcaccaatggcatgaagatcctgcacgtgggcgacccgcaggtctgagtgacacgctgaaaaacaaaagccccgccatgaaaatggcggggctttttgcatttcagggaagctgttgtgtgatgccaaaggacctcatcgggggcaagccccctcccaccttttgaccgcgctgcctatcaaatgtgggagggggcttgcccccgatgaagcccgatcaaccaccacacgttcatcgccgggtgataaacgctgacaacgccgcaatcgcctcaggcgacttcaaccgttgggtgaacaaagcgccctcctcctcgatcacctgccgcaactgctcgcgatccacactcttcatcaactgcttggtgacctgcaccgcccccggcgccagggtctcaaaacgctcggctacttcccgcgccttggccaatgcagcctcgccactgcccagcgcttcggtggcaagcccccacgccgctgcctgttcgccgctaaacccctcgcccagcagcagcaattcggcggctttcgcgtgccccagcaacctcggcaaaatcaggctggacccgaactccggacacagccccaggttgacgaacggcatgcgcagccgcgcatcgcggctgatatacaccaagtcacaatgcagcagcagggttgtgccaatccccaccgcagcccccgccacggcagcaatcactggctttctgcaattgagcaggcttttcatgaagtgaaacggtgggctgtcgaggtcgttgggcggctgttcgagaaaatcgctgatgtcgttgccggccgtgaaacactcattgctgccctggatcagcacgcaacggatatccgcgtccgcgtcggcgtgctccagtgcattggccaattgcgtgtacatggcacgggtcaaagcatttttcttgtcgggacggttgagctgcaggatcagcagcccgcgttcgcgcacctgttggatggtatcggtcatgacgagtctcgcggcgggaaaaatcagcgctcaaccacgaggcagaaacacatcggccagcagctgattacgcggcaatcctgccaggaacaggcgcttggaaaacgcctcgacgctggctgggtgcccgcagagtaaggccagcgtttgccgcgaaacaagccgcagttgcgccaatgcctgggccacctgcgccgccgtccacagttccaccgacacgtttggatgctgtgcagccaactgcgccaagggttcggccagataatggccttcggcatcatgggccaggtgaatcacgcggatggcgccctggtgatcctggcgcagcgcctcacgcaacacgccccacaacggccccaacccggtgccggacgccagcagccacaatggccgcgtttgccagtccggatcatattgcagcgcaccgccgcgcaaatcacccaggcgcagccgatcacccacctgcaactgccgggcaagatcgctgaattcgcccggcaggcgacaatcgagatgaaactccaggaatggatcttcctggggcaagctcgccagggaatacggccgcgccacctgcccggcccacaacaccaggtgctgcccagcccggtaacgcaaaccgcgctccggttgcaggcgcaggcgcagtacgttcgggttcagccaatcgacacccaccacctgggccggcaagccatcacgcgtcgggtcaaacgcttcaacccgcagatcgccgctgacctgacactggcaggccaaccgccagccgtcctggcgctgcgccgggctcaaggcttcgggctgcttgtcttcgacctcgccctggcaacgcaccaggcaggcatggcaactgccggcgcggcaactgtaaggcacggccacacccgcctggttcaaggcatccagcaggttgctgccgggggttaccgaccaatggcgttcgccgacgtacagttcaggcatataaggactcagtcacaaggggcgcgcacagggaatcatgcctgcgacagtttgaccatagtcgggtgtatcggccaccgcgccgggttatactgccgcgcctttttagcgtcgcgcctgcaccactttggcgtgccttggaaaggtggacccagccgaccgatgcaacactgggcccacctttattgaatgttcccttatagaggagcgcgactcatgaccgtgatcaagcaagacgacctgattcagagcgttgccgacgccctgcaattcatttcctactaccaccccgtggatttcatccaggccatgcacgaagcctacctgcgcgaagaatcgccagcggcccgtgattccatcgcccagatcctgatcaactcgcgcatgtgcgccaccggccatcgcccgatctgccaggacaccggtatcgtcaccgtgttcgtgcgcgtgggcatggacgtgcgttgggatggcgccaccatgggcctggacgacatgatcaacgaaggcgtgcgtcgcgcctacaacttgccggaaaacgtcctgcgtgcatccatcctggccgacccggcaggtgcacgtaagaacaccaaggacaacaccccggccgtgatccactactccatcgtcccgggtaacaccgtggaagtggacgtggcggccaagggcggcggttccgagaacaagtcgaaaatggccatgctcaacccgtcagactcgattgtcgactgggtgctcaagacagttccgaccatgggcgccggctggtgcccaccgggcatgctgggtatcggcatcggcggcaccgccgagaaagccgcagtgatggccaaggaagtgttgatggaatccatcgacatccacgagctgaaaaagcgcggcccgcagaaccgtatcgaagagatgcgcctggagctgttcgagaaggtcaaccaactgggcatcggcgcccaaggcctgggtggcctgaccaccgtgctcgacgtgaagatcatggactacccgacccacgccgcgtccctgccggtgtgcatgatccccaactgcgccgccacccgtcacgcgcattttgtgctcgacggttctggcccggcgtcgctggaagcgccaccgttggacgcctacccggaaatcgtctgggaagccggcccgtcggcccgtcgcgtcaacctcgacaccctgaccccggaagaagtacagagctggaagccgggcgaaaccgtgttgctcaacggcaagatgctcaccggtcgcgacgccgcgcacaagcgcatggtcgagatgctgaacaagggcgaaaccctgcccgtggacctgaaaggtcgcttcatctactacgtcggcccggttgatccggtacgcgaagaagtggtcggcccggctggcccgaccaccgcgacgcggatggacaagttcacccgtcagatccttgagcaaaccggcctgctgggcatgatcggcaaatccgaacgcggcccgactgcgatcgaagcgatcaaggaccacaaggccgtgtacctgatggccgtcggcggcgccgcttacctggtggcgcaagccatcaagaagtcgcgcgtagtcgcgtttgccgaactgggcatggaagcgatctacgagttcgatgtgaaagacatgccggtgaccgttgctgtcgacagcaagggcgaatccgtgcacatcaccggtcctgccatctggcagaaaaagatcagtgaaagcctggcggtagaagtgcaataagcgcttcccctccaaacataaaggcgactgcggcccatggcccagtcgccttttttatggcacatgctatggtgcactccccttaccgtgcctgcccatcaccgtatgatcgcgatcccccgccccctgcgcctgaccttctactccctgctgatcatcgccggtgccctgctggccgcagccttggccactcgccacgccgaacgccaggccctggtggacgatgccgcccgtgccaatcagcaactggcactctatgccaactcgttgcacaccctgatcgaacgctaccgcgcgctacccgccgtgctggcgctggactcggaaatgatcagcgcgttgaaaggcccgctggacgccgccactcaggacgtgctcaaccgcaagcttgaacgcatcaatggcgccgcgcagtcctccaccctggaattgatggatcgcaccggcctggcggtggccgccagcaactggaacctgccgagcagttatgtagggcataactatgcgttccggccttacttcagccagaccttgagccagggcaccgggcgtttttatgcggtgggtgtgacgaccggcatcccagggtatttcctctccagcgcggtgctggatgaacacgagcagttcctcggcgccatggtggtcaagctggaatttcccgagcttgagcgtgaatgggcccagggcaatgatttgctgctggtcagcgatgcgcggggcatcgtgtttatcgccaaccagcccggctggcgttatcgcaacctgcgtccgttgtcggccaacgacctcgccgagctgaaagccacccgccaatacgacaaaaaacaactgcaggcgctggagacccagaccctgcagcgctttgacgaaaacagccacctgatgcgcgtcaacggcccggacggcaatgccaattacatctgggagtccttgccgctgaaagccgaaggctggaccctgcacctgttgcgcaagccccagttcgcctttgaagatcaacgcaacgccggcctggcggccgccggttcctggctggcgttggtattcctagtgctgttcctgacccaacgctggcgcctggcccgcttgcgccagcgcagtcgcgaagagcttgagcaactggtggaagaacgcacccaggcgttgcgcaccgcgcaggatggcctggtgcaatcggccaaattggcggcgctggggcagatgtccgccgccctcgcccatgagatcaatcagccgctgacagcccagcgcatgcagttggccaccttgcgcctgctgctggatcacggccgcgtcgacgacgcctaccaggccctcacgccactcgacgatatgctcacgcgcatggccgccctcaccggccacctcaagaccttcgcgcgcaaaagcccgagcggcctgcgtgaacgcctggacctggccaccgtggtcgaccagtccctgcacctgcttgacgcccgcctgcgcgatgaggcgatcggcgtggtgctggacctgacccgacctgcctgggtgcgcggcgatgccatccgcctggagcaggtgctgatcaacctgctgcgcaacgccctcgacgccatggccgacaaaccgcgcaaacgcctggaaatccgcctgcacgccgatcagcagctgtggcaactgacggtcagcgacagcggcggcgggattgccgaagaacacctgaacagtgtgttcgacccgttctttaccaccaagccggtgggtgacgggctcggtttggggctggcggtgtcctacgctatcgtgcacgaattgggcggtcgcctgatcgccggcaaccgtggcgacggtgcggtatttaccctgactctacccatcgcgctggagacgcccgacctatgttgaacgcggtgattgtggtcgatgacgaagccagcatccgcacggccgtcgagcaatggctgagcctgtcaggctttgaggtgcagttgttcagccgcgccgacgaatgcctggcgcaactgccccgtgatttccccggcgtgatcctcagcgacgtgcgtatgccggggctcagcggcctggagctgctggccgaagtgcgacgccgtgatgccgatctgccggtgattctgctcaccggccatggcgatgtaccgatggcggtcgaagccatgcgcgatggcgcctacgacttcctcgaaaaacccttcagccccgatgccctgctcaacagcctgcgccgtgctttggacaagcgcgggctgatcctggaaaaccgtcgcctgcaccaacaggccgatcatcgggcgcaattggaatcgacactgctgggcgtatcccgaagcttgcagaccttgcgtcgccaggtgctggacctggcgaacctgccggtcaacgtactgatccgtggcgagaccggcagcggcaaggaaatggtcgcgcgctgcctgcatgatttcggccctcggtcaaagaagccttttgtagcgctcaattgcgcggcgatcccggagcagttgttcgaggccgagctgtttggtcacgaaagcggcgcgtttaccggcgcccagggcaagcgcatcggtaaactggaatacgcccacggcggcacgttgttcctcgatgaaatcgaaagcatgccgctggcccagcaggtaaaactgctgcgtgtgctgcaggagcagaagctggagcggctgggctccaaccagagcatccacgtggacctgcgcatcatcgctgccaccaagccggacctgctggaagaagcccgcgccgggcgctttcgcgaagacctggcgtatcgattgaatgtcgcgcaattgcgcctgccgcccctgcgggagcgtcgcgaagatatcccgttgctgttcgatcacttcgcacagagtgccgccgaacgcctgggccgcagcgtcgagccattgagcggcgcgcagttggggcgcttgctcagccatgactggccgggcaacgtgcgcgagttggccaacgtcgccgaacgccaggtgctgggccttggcgacccggaaccggaaggcatcgaggccggacagtccctggccgcacagcaagaggccttcgaagcgcactgcctgaaagccgcgctgacccgacacaagggcgatatcaaggcagtactggccgagctgcaactgccgcgtcgtaccttcaatgagaagatgcagcggcatgggttggtgcgggagatgtttctctaggcgaatccttgtgttgactggcaggccgctatcgggggcaagccccctcccacattttgatttgtgaacgcgctcaagtgtgggagggggcttgcccccgatgaggacagcagccataagcggatttccgctcacccccctgaaaatcatcagcgactttccgctcaaaaaaatcaccaaacccttctaggccgggccttcatccacctggcacagctcctgctatagctcgagccaggctgcgcacgcgccgctccataaaaacaactagatgaaggatccttcaatggataactccaacgccctgcctctggggtcggcggccgcgccgacgaaagagcgcactacctccagccgcatcaaatcgattttcagtggttccgtcggcaacatggtcgagtggtacgactggtacgtctacgccgctttctcgttgtacttcgccaagactttcttccccaaaggcgacaccaccgcccaactgctcaacaccgccgcgatcttcgccgtgggctttttgatgcgcccgatcggtggctggctgatgggcctgtacgccgacaaggtcggccgtaaaaaagccttgatggcctcggtctacctgatgtgcttcggctcgctgctgattgccctgagcccgggctatgaaatcattggtatcggtgcgccgatcctgctggtctttgcccgtttgctgcaggggctgtcggtcggcggcgaatacggcacctccgccacgtacctcagcgagatggcgaccaaggaacgtcgtggtttctactccagcttccagtacgtgaccctgatctccggccagctcatcgccctggcggtgctgatcgtgttgcaacaactgctgaccaccgagcaactgtatgcctggggctggcgtatcccgttcgccatcggtgccctctgcgcggtggtggcgctttacctgcggcgcggtatggaagaaaccgagtcgttcaccaagaaggaaaaagccaaggaaagcgcgatgcgcaccttgatgcgccaccccaaggaactgctgaccgtggtcggcctgaccatgggcggtacgctggcgttctacacctacaccacctacatgcagaagtacctggtgaacaccgtcggcatgagcatttccgactccaccaccatctcggcggcgacgctgttcctgttcatgtgcctgcaacccattgtcggcgggctgtcggataagatcggccggcggccgatcctgatcgccttcggcatcctcggcaccctgttcaccgtgccgatcctcaccaccctgcacaccatccagacctggtggggtgcgttcttcctgatcatggcggcgctgatcatcgtcagcggctatacctcgatcaacgccgtggtgaaggccgagttgttccccaccgaaatccgcgccctgggcgtgggcctgccgtatgcgctgacagtgtcgatcttcggcggcaccgctgaatacatcgcgctttggttcaagagcatcggcatggaaaccggttactactggtacgtgaccgcgtgcatcgcggtgtcgctggtggtctacgtgaccatgaaggacacccgcaaacactcgcgcattaccaccgactaaacgtcagttgcagtcaacctgtgggagggggcaagcccctcccactttttaaatcaggacaagtcagctatcgccttacgtccgtaccgccgctgcgcgtacgacgcccccgcaatcatcaccaccaacaccgccgccaaaactgccgacgaaccgatggtgccgaaatccagcccacccttctcatggggcttggtaaggaagtcacccaaggtcgcgccgaacggccgggtcagtacaaacgccacccagaacaacagcactgaagaaatcctggtgaagtatttgagtgccaccaccgccgcaatcgccgagccgatcaacaacgcgccgccggcaaaacccagccctgagtcatctgccaggaaatcgcccaacgcggtgcccaaggtgttggagaacaggatggccatccagtagaacaactcaccccggaaggtctgcaccttgttcacgttcagcgaatcgccgctgaggtgccacaacgcgaagatgatcatcaggatcgcgaccaggatcatggagcccgcggcataacccagccccaaggtgcggtccatgaaatccgacatggtggtgcctgcggtgctggtggacaaaatcacgatccagtacagcaccgggttgtaggttttcgagcgcagttgcgtcaccagggtgatcaggaacacgctgatcagcatcatcgaactgatggcataaccgacattgagggtcatcgacagcaaatccccggcggtttcgcccagggtggtcgcgcagattttcatgacccagaacgccagggtgatctgaggaagtttattcataagggggaaggctccaaagctcagtctctcaataggccgacttatcgggttgtcgacagtgggcgcagactgacggtggagctgtgaaaaataggtgggcgatgaatgaaaattccatagtatggccacttcatcgacgaccactgcaggagccccggccatgcccgacgatatccacttctacgaacccgccaacggccacggcctgccccatgacccgttcaatgccatcgtcggtccacggccgatcggctggatttcgtcccacgaccgcgaaggccgcctgaacctggcgccctacagttttttcaatgcgttcaactacattccgccgatcattggattctccagcgtcgggcgcaaagacagcctgaacaacatcgagcagaccggcgagtttgtgtggaacctggccacccgcccgttggccgagcagatgaaccagagttgtgccccggtatcaccggacgtgaatgaattcgaattgtccgggctgaccccagtggcctcgaagatcgttggtgtaccgcgggtgggcgagagcccggtgtcgttcgaatgcaaggtgacgcagatcatccagctgcaacgtgccgacaaagagttggtgccgagctggctggtgctcggtgaggtggtcgcggtgcatattgccaagtggctgctcaaggatggcatctacgacaccgccgccgccgagccgatcttgcgcggtggcggaccggcggattacttccagctggggccggaggccctgttcaagatgtatcgcccaggcgccggcaaaccttgactgaaacacaataaaacgtgggagggggcttgcccccgatggcaatggcacatccaacatcgttgttgactgacacactgctatcgggggcaagccccctcccacattggattgtcggcgttgctcagttggcggcgctcgcccaggtcagctgcccctcttcatccacaccgatcagccgttcaagctgcacggtggctgcatcatcggcatcggcggccgtcttgaacgtctgtccgtccaggattttgtgaaactgcggggcacccatgccatcgagtgccttgacggcgacggcggcgctgtagcccccttcacccggtactacggcggatacggcttcgtggtgggcaaattgtttacgtgccatgttgcaggtcctggccaatggaaagtcggccattctagaccttcagccggcgagttgcaggtactcgccgtaggcgtgtgcggcggatgcatcggtaaaggtctggaagtccatgctgcgcacgaccatgtcgttcaacagctcggtaaagatcatcagcgctggagaattgaagtaggcgctcatcgcctgttcgctgctccagaaaccggagatcaaccatacatcgggatcgacctgggaatgctgcaacgagaattgcaggcaaccctgagcctggcggcccggttcgatcaaactgctcaagcgtgcaccgagttcggtgctgcacccggtgcgggcgcggataaaggccatatggctcgcgggaatgggggtggacatgttcgactctcccgttgagaagtgatgctcggcaagcactgtgagggcgtgttgccacaggatcaaagataacggcgcgggtagtcgcgcggttagtcaattcctgtcggcttattgcacaatcctgcgagaagcgtaggggggacgttcggcacagcggttttattccagggcccaacgccttgtttcagggagatgacaggtgccgcgattgcctgattcacgatgtatcgcaggatcaggcaaggattgtgcagaatcgacgtaacactgtttgaaaagccgccgctaagctgaacccatcgaagtagcccctagaggacgttccatgtcgtcgcccgaacataaagccatccccctcgacgccgagatggaaaaacagcgcgccgaactggccagcatcgtgcaccggcatacctgggaggacggctcctacggtacggccatcaccactctgtttctgaaccgccacaacaccccgcgcgacttcatgccggtgctggtggaaccggccctgtgcatcctggccagtggcagcaaggaagtccgcctggccgacgagatctttgcctacgacccgctcaactacctggtgttctcggtggcgatgccggtggccgggcggatcatcgatgccacgccggaagacccgaacctttcggtgcgcatcaatatcgatccggcgcaactgacagccctgatcgcagaagcaggcccaatgggcgtgccgtcgcgcccgacttctcgcggcatgtacgtcgatcgcatcgacggtcaactgctggacgccgtactgcgattggcccgcctgttggatacgccgaaagacatcgccatgctcgcgccgttgatcaaccgcgagattctttatcgcctgttgcgcggcccgcagggttatcggctgtatgaaatcgccgtggccaacagtcagagccatcgggtcagccaggcgatcaagtggttgaacggcaactacgaacaaccgctgcgcatcgatgacctcgccaaggaagtgaacctgagcgtctcgaccctgcaccaccgtttcaaggcgatcaccgccatgagcccgttgcaataccagaagcagttgcgcttgcaggaggcacggcgcttgatgattgccgaagggttggaagcgtcggcggcggggtatcgggtggggtatgaaagcccatcgcaattcagccgggaatacagccggttgtttggcgcgccgccgttgcgtgacctggcccggttgcgccagagcatttaatcgagggtgcgcggcagctgcaacgtcacccgcaacccaccctcacgcaaattctgcaaactcacttcaccgccatggctgtgcgcaatgttgcgcgcaatccccaggcccaagccgtaaccctgttgctgcccggccaggcggaagtgtggctcgaatacttgctccaaccgctgctccggcacgccaggcccctcgtcgtccacatgcaggacgaactccgcgccatcgtcctcgatgtgcagatgagcgttctgcccgtacttcaaggcattgtcgatcaggttgccaatgcaacgtttgagcgccagcggcttgcccggatacgccgccagggctgcaccgttcagcgtgacccggccgttgccgttgggtgccacgtaaggctccaccaggcattcgagcacatggttgaggtccaccggctcgatgttttcgtggatatccgtgtctttcacgcattgcagcgcgcccttcaccagcaactccagttcatccaggtcacggccgaacttggtttgcaggttctcgtcttccagcagttccacgcgcaggcgcaggcgggtgatcggtgtgcgcaagtcgtgggaaatcgcactgaacaactggctacgctcggtcaggtagcggctgatgcgctcacgcatggcattgaaggcacggcccacttccaccacttcgctgccaccgccttcggccactggttccacgtcggcccccagggacatatcccgcgccgcccgcgccaaacgcttgagcggccggctttgccagtgcaccagcaggccgatgaacaacagcaaaaagccgctggtcaacacgatgaaccacacctgctgggacggcaggccctgttcttcaaggctggtgtagggctcgggcaacagcgaggcgatatacaaccattcgcccggggcgagctggatctgggtgaccagcaccggcgggttcaccggttccagggtcagcgcgtagtgagcccaggaacgcggcagctcatcgagtttcaggccggcattgaagatgcgcaggtcttcggcgctgacgaactccaccgacatatgcacatcggcgccgagggtctgcttcagcacctcatccaccgcttcaagcaccgcctgtttacgcggggtctgcggcaggatggccatgtccagcgggcggtcattgagggtcaccacgaaacgcgtgccgcccatgctgcgcagttgatcgagcaccagtgggcggtaggccaccggcaacgagcggaaataactcacgctggcggtcatcgaatgcgccaggctgcgggcgctggtgaccaggccttcgagctgggtggcgcgcaattgcgagacccagatcacgctggacagcgcctgggcgaacagcaccgccagcagcgtcagcagcagcatgcgccccagcagcgaacgcggcaccgggaaacgccggcggtgttcggtcaaatgttcagtggacattgccggcaaccacgctggctgccagttgataaccactgccccgcacggtgcggatcagacgagggggcttttcggtgtcgcgcaggcgttggcgcaggcggctgacggccatgtcgacgatgcgatccaacggcatcaggtcgcgaccccgggtagcattgccgatggtgtcacggtcgagaatctgctgcgggtggtcgagaaacaatttgagcagggcgaaatcggccccggagaggatcacttcttcgccgtccacatggaacaggcggtggctgatcatatccagccgccactcatcgaataccagcacttcgccgccgttgctgcgctcctggccgaactggcaacggcgcaacaaggccttgatccgcgcttgcaactcgcgagggctgaagggtttgccgatgtagtcgtcggcgcccagctccaggccgatcacacggtcggcctcgtcggaactggcggtgagcatgatgatcggcacctgcgcctggcgcgggtgctggcggatccagcggcaaaggctgaaaccgtcttcgtccggcaacatcacatcgaggatgaccaggtcgcacggcgcctcgttcatcgcctggcggaaccccgcgccatccggcaccccacgcacctggaaaccggcgcgactgaggtaggtctgcagcaattcgcggatttcctggtcgtcgtcgaccaggaggatcgatttactgattacgctcacggggtcctccttgttgttatggggggttgttgatggcctcatcgggggcaagccccctcccacactggaatgcgttcccaatgtgggagggggcttgcccccgatagggccatcagcccctatgcaaaagcctgttccaacgcgacgccagccccggtcaacccggaatacggcgcggtcaccaaccacaccggaatacccttgaagtagtcgctcatgcagcctttgtcagcaaagctcctggcaaaaccgctgtggataaagaagtcggcaaacctcggtatcaccccgcccacgatgtacacaccaccgcgtccaccggtggtcagcacattgttaccggcgacgcggcccagccagatgctgaactggtccaacacctccatcgccaccgggtcaccggccaggccggcggccgtgatggcttcgggcgtttccagtaccggcgcatggccgtcgactgcacagatcgcccggtacagacgtggcaacccaccaccgctcaaagcggtttcagcgctgacatgcccgatctcggtgtagatgtgctgccacagttgggtttcccgtgggctgctcagcggcaggtcgacatgcccgccttcccccggcagcgccgcaaagcggccaccgcccaagtccagcaatgtaccgacacccaggccagtgcccggaccgatcaccaccgcaggccgcaacggctccggcgtgccttcgcagaccacgcggaattcgtcgggcttgaggcgggtcatgcccagggccatggccgagaagtcattgaccagcagcagttcgtccacctgcaacgccttgcaaaacgcagtcttgctcaggcgccagtgattgttggtgaatttaaattcatctccgctcaccgggccagcgacagaaagacacaccgcgccgatgtccccgatttccaggccttcctctttgaggtagaccttgatcgcctcttcaggactcttgtgatccgccgtggcatgcacacggatcgaatgcagttcctgatcccgccacaacgcaaaacgggcattggtgcccccgatgtcaccgaccagcgcaagcttcacttaagcgtctccaaggcacaggtaaaggcgctggcgccctgctctgcggagcttgcggccaagcgcataaatgcaaacagctcgcgaccggcccccacgttattgcccaacaggcccgtggcaggcgcgcgcgctgcaaattcttcggcgtccaccttaagctccagggtgcccttcacgccatccacgcgaatgatatcgccatcgcgcacccgcgccagtggtccgccgctctgggcttcggggttgacgtgaatcgcggcggggatcttacccgacgcgcccgacatacgcccgtctgttaccagcgcgaccttgaagccacggtcctgcaacacaccgaggaacggcgtcatcttgtgcaattcgggcatgccattggagcgcgggccctggaagcgcatcaccgcgacgaagtctttttccaactggccggccttgaacgcgtcggccaggtcctgctgatcctggaacaccacggcgggtgcttcgacaatctggtgttcaagggccacggccgagactttcatcacgccgcgccccaggttgccttccatcacgcgcaagccgccctcgggcgagaacgcacgggccacggggcgcaggatgctttcgtcgaggctctcgatcgggccgtcgcgccagatcagctcaccgtcgaccaggaacggttcctgggtgtagcggctcaggcccttgccggccacggtgttgacgtcttcgtggagcaggccggcttcgagcagttcacggatcaggaacgacatgccgcccgccgcctggaagtggttgatgtcggccttgccgttcggatacacgtgggaaagggtcggcaccacctcggaaaggtcggccatgtcgtcccaggtgaggatgatgcccgccgacatggcgatggccggcatgtgcagggtgtggttggtagagccgccggtggcgttgagcgcgatgatggagttgacgatggacttttcgtcgacgatctcgccgatcggcatgaagttgccgttggccttggtcaggcgcgtgacctggtgcgcggcttcgcgggtcagcgcgtcacgcagcggtgtgtacgggttgacgaacgaggcgcccggcaggtgcaggcccatcacttccatcaacaactggttggtgttggcggtgccgtagaaggtgcaggtgccggggctgtgataggacttcatctccgattccagcagctcttcgcgggtggccttgccttcagcgtagcgctggcgcacatcggctttctgcttgttggaaatgcccgacggcatcggcccgcccggtacgaagatcatcggcaggtgaccgtagcgcagcgcgcccatcatcaggccggggacgatcttgtcgcagatgcccagcatcaaggccgcgtcgaacatgttgtgggacagcgctaccgccgtggacatggcaatgacttcacggctgagcaggctcagctccatgccgggctcgccctgggtcacgccgtcgcacatcgcgggcgtgccgccggcgaactggccgaccgagccgacttcgcgcagggctttcttgatctgttcagggaaatgttcgtacggctggtgcgccgagagcatgtcgttatatgacgaaacaattgccacgttggcggcattcatcatgcgcaggctatttttatcttcagtgccgcaaccggccacgccgtgggcaaagttggcgcattgcagcttgccgcgcatcggaccgtcgctggctgcgccgcgaatgagcgcaaggtaagcctcgcgggtggcgcggctgcgggcgataagccgttcggtgacctcaagaacgcggggatgcatgtgtagaactccaggctaacggatgtggcgacctgagtgtctatgctgatcaaacgcccgcagcgcatgggatggcagggagtcgtttggatcatcggaccagttgattcaggtcactcgttgtagattgaacaaaatattgccactaaaaaggcttgttttctatttttatgcgaataatcttgtaattcttacaacaaatcgacgacaggcactttccaatgactcttcgtatcgcaatcaatggttttggccgtatcggccgtaatgtcctgcgcgcactgtatacccaaggctaccgccaggatttgcagatcgtcgccatcaatgatctgggcgacagttcgatcaatgcccacctgctcaaatacgacaccgtacatggcactttcgaagcagaggtcgcccacgatcaggaaagcctgaccgtcaatggtgaccggattgccgtcagtgccattcgcaacccggccgacctgccctgggctgcgcacaagatcgacgtggtgttcgaatgcaccggcctgttcaccgaccgtgacaaggctgccgcccatattaccgccggcgcacgcaaggtgatcatctcggcaccggccaagggcgcggacgccaccgtggtctacggcgtcaaccatgacattctgcgtcaatcccaccagatcatctctaacgcctcgtgcaccaccaactgcctggcgcctgtggctcaagtgctgcaccgcgagctgggtatcgaaagcggcctgatgaccaccatccacgcctacaccaatgaccagaacctgaccgacgtctaccacaccgacccgtaccgcgcgcgttcggccacccagaacatgatcccgagcaagaccggcgccgccgaagcggtaggcctggtgctgccggaactggcgggcaagctgaccggcatggcggtgcgggtgccagtgatcaacgtgtcgctggtggacctcaccgtacaactgaagaaagaagccacggcgcaagaagtcaacgcgctgctcaaagaagcaagccagcactcgaagatcctcggctacaacaccctgccgctggtttccagtgacttcaaccacaacccgctgtcgtcgatcttcgatgccaatcacaccaaagtcagcggtaaattgctgaaagtgctggcctggtacgacaacgaatggggtttctccaaccgtatgctggataactgcttggcgttgtgcaacgccgaataacgtggtttctgcgggaccttgtgaaggggcttgtgtgggagggggcttgccccctcccacattggtttgtgtcgcgcataaggaaaatagccacttgccatttgagttgatgataagcattatcattaactgcaaatcggtctggtagcactgtgagccaatctcgcttcaaccacgtctttctcacccaacgggtggttctgcttcgcaccttgcagcggatggtgaataaccacagcaccgccgaggacctgttgcaggaaacctacctgcgcgtcactcgggccctgagcgagcggccgatcgatcaccttgaacccttcgtctatcagaccgcgcgcaacctggcgctggatcatctgcgtgcgcgcaggatccaggcccgtacgctgcaggaagatgtcccgctggacgtcctgcaaagtgtcgccgcccccatcagcacgcccgaagatgccacccaggccgagcaaatgcttgaggccctgagcgtcagcctgggccagttgagcgcccgccagcagcagattttcatcctcagccgcctgcacggttgcagttaccaggagatcgccgatcagctggaagtgtccttgagcaccgtgcaaaaggaactgaagttgatcatggccatctgtgtaggtgtggccgaacgactggatcggccttaagcttcacccgacagaaacgtcgaccctagctgtaggaaagttgaatagaacgtggcgaagacccgaggaacaccgtgacggacccgaacaaactgcgcccccatgatgtggctcatgaggtgttgcaagacacggctatggaccaagccctcgactggctgatcgccttgcagtgcccgcagcccgggcagcaggccgaattcgaagcctggctggccagcgatcccgctcacgtccacgccttcgccaaggcccaggctgcctggggtggcgcgccagtgcacagcgccgccgtggccctggcagcaccgcgcaagcccagcgcctggcggcggatcaagccccattggaaaccgttggccaccgccgccgtgttgctgatcggcctgttcagcttcagcaacctgccggtgcgcctgcaagccgatcacctcaccgtggtgggtgaacgccagcgcctgcaactggacgatggttcaaaggtgttgctcaacaccaactcggcgttttccagcagcatcaaggaccaccagcgcatcgcccgcctgtaccagggcgaggcgtttttcgaaatcaagcccaaccatggcctgcccctggaaatcgacgccggccccgtacgtgccagcgtgcgcgatacagccttcgccgtgcgctacctcaatggcgaagcacaggtgcaagtgcagcgtggtgatgtcgacctgagcaataccttcgacgatgcccgcgtgcgcctgagcgccggtgaaagcatccgtatcggccccaagggtttcggtgcgcccgccaaactggacgccaacaaggacctggcctgggtgcaaggtcggctgatcttcgaaaactgcccgatgagcgaagtccttgccgaactgcgccgctattaccccggctggatcgtcaacaccaacgaccaactcgccagcgtcgccgtcaccggcaattaccgcctggaccagccgctggacgtggtgcgctccctggcccacatcacctcggccaagctgtcggaatacccggcactggtgatcctgaactaaatgagaattatttttactcgatagtcggcagtggtacgtctcgtcttagccaatgcaactgattcctatttgattcagttcgcaactataagattcgtaccccggagcgctctcgatgtcctcttgtttcaaccgccggtcctcttcgcccgtcctgtccttgctgacggtcgccatcctgctggccggtgcgccaatgatgaccgccaccgccgccgaacctgccccacgcagccacggcaactacaacttcagcatcgagcagcaatcgctggtctccgcgctcaacgcttttaccgccgtgaccggctggcaagtcggcctgccggcggaactggcccagggtgtgtcgtcccctggcgtacgtggcccgttgccgccggaaaaggccctggaccggctgttggtggggaccaacctgagctaccgcaagctgagcagcaacaacattgttctcgaaaagcgcacggcgggcagcaccctcaacctgcaacaggtgaccatcagcgccacccgcaacgagcaggatgtaaacagcgtaccgagcaccgtcagcgtgcaggatcgcgaagaactggaccgccagaacgtcaacaacatccgcgaactggtgcgctacgagcccggtgtctcggtcggcggcgcgggcacccgctccggtaacgccggcttcaacatccgcggtatcgacggcgaccgcatcctcacccaggtggacggcgtggaagtgccggacaacttcttcaacggcccctacgccaagacccgccgcaactacgtcgacccggaaatcgtcaagcgtgtcgagatcctgcgcggcccagcctccgccctgtatggcagcagcgccatcggtggtgccgtgagctacttcaccctcgacccggacgacatcatcaagcccggccaggatttcggcgctcgcctcaagaccggctacagctccgccgacgaaagctggctgacctccggcaccgtcgccggccgcgtacaggacttcgatggcctgctgcaccttagccagcgcaatggccacgagaccgaatcctacgacggcaacaacgccaccggcctggcccgcaccggcgccaaccccgaggacgcgcgcaccaccaacatcctggccaagctcggctggaactatggcgatgacaaccgcctgggcctgacctatgagaagtacaaagatgatcgcgacgtcaacctgaagaacgccgtaggcggcccgttcatcggcggccgaggctttaacctctaccgtgatcgtcgtggcaacgacaccattacccgtgaacgtttcggcctggaaaacagctttgccctcgagtcaccgattgccgaccgcatcaagaccagcctcaactaccagatcgccaagaccgaccagaccaccgccgagatctatcagtcaggccgtcgtgtcttgcgcacccgcgacacgctctaccaggaaaaacagtggatcttcgacgcccagttggacaaagcattcagcctcggtgaaaccgaccaccaagtgacctacggcaccaccctcaagcagcagaaagtcaccggttcgcgcgagggcaacgcgacctgcgtggccgtcggcagtggttgcaccgccatcggcgcgcccagcccgattgccagcgacagtgtgaagaagtccagcgacttccccgatccgaccatcaacacgtattcgctgttcgcacaggaccagatcacctgggacaagtggaccttcctgcccgccgtgcgctacgactacacccagctcaaacccaagctgacccaggagttcctcaacaccgtcaacccgacaggcgcggacccggtgagcgacaaggaaaaaacctggcaccgtgtgacgcccaagtttggcctgacttacgccctgaccgatcaatacacctggttcggccaatacgccgaaggtttccgtacgccgtccgccaaggccttgtacggccgctttgaaaacctgaacctgggctacaccgtcgagccgaaccccgacctcaagccagaaaccagcaaaggcgtcgaaaccgggattcgcggcaagttcgacgaaggctccttcgagatcgccgtgttttacaacaaataccgcgactttatcgacgaagacaatgccgttgccggcggcagccttgaacagttccaggccatcaacatcaagcgcgccaccatcaagggcgccgaagccaagggccgcctgaacctggatgccttcggcgcgccgcaaggcctctacacccagggctcggtgtcctatgcctacggccgcaacgacgataatggcgagccgttgaacagcgtcaacccgctcaagggcgtcttcggcctgggctatgaccaggacaactacggtggcctgttgagctggaccttggtgaaaaagcaggatcgcgtcgacagcacgaccttccacgcgccggacggcgacaccagcggccccttcaagacccctggcttcggtgtggtcgacctgacggccttctacaaagtcactcaggacgtgaccatcaacggcggcctctacaacctcaccgacaagaagtactggaactgggatgacgtgcgcagctacgacagcgtcggtgaagccgctgtgaccggcccggccaacctcgaccgcctgacccagcccggccgcaactttgcgatcaacgtgatctgggacatctagcaacgccctactcacctcgtcgaaatttcatcgacggggtgaggattttttactgtgccgcgtcttcttgttcgtctagttgataacagctctctttcgggcactaaggcgtatcccttctcaaggactttttcatgaccgcttcccctaccgcagaacgcgcaagcctgcgctcccaacgcctgaaccagatcaccaacgagccgcacaccaagctggacgcactggtcaaggcccacgccccgtttgaaacccaggccaacttcgcccgtttcgtggtggcgcagtacctgttccaatcggaactggtagccctgtacaacgatgccgaactgatcaagatcgtgccggacctggccgagcgttgccgtgccgaagccgccaaacttgacttgggcgacctcgacaccgacgtacctgcaccggttgccggcgcagtgaaaaacccgagcaaggccgaagccctcggctggctgttcgtgtccgaaggctccaagctgggcgctgcgttcctgatcaagcgtgccgtgggcctgggcctgagcgaaaccttcggtgcccgtcacctgggtgagccggcgggtggtcgtgccgagggctggaaaagcttcacccgcaccctcgacgccctggaattcagcgccgaagaagaagccgccgtggaaaaaggcgcaatcgacgcgtttgtgcgcttcaccgtgttgctcgaacaggcgtacgctagcgcccctgaattggcctgacatccagattgaaatgccatcaactgtgggagggggcaagccccctcccacagttggcgctcacttcgcgacgctacaaataaaccatgacccgcaaaaccccttccacctcgaaaatcgcccggatcctcttcggcctgctggcctatgtcagcctgggcattgggttgatcgcgattgtcgtgccgggtttgcccaccaccgaattcatcctgctggccgcctgggccgccaccaaaagctcgccacgcctcagcgcctggctggagaaccaccggctgttcgggccgatcctgttcaactggcgcaacggcaagatcatcgctcgccgggccaaggtcagcgccaccgtaagcatgctgctgtgcgccgtcctgatgctggtgatgctcgaccacggctggccaatctacctggccattgccggaatgagcctgggcaacctgtggatctggtctcgacccgaacgactcgcacagcccgtatgacgttggctgtaggcattttcctaccactcatcgcctgctgctcatgaataaatttgttacgccgatgtttcagacatagcgctgaatggacttggcctgcactgcgtgccttccaacaagtccattcgcgagtgagcctatgttcaacaccctctccatccgcttgaaaatcgtgctgttgtccggcctttgcctgctgggggtgatagcgctggtcgtcagcatcaatatctacaacaccagccagaatgatctgttggtcagcgattccagctcgcgcatgctcaccgccagcgtggaacaactgctgcaagccagggccgccgagcaagcgggccagttgcagaaaaccttcggcgacagcctgatggcgctgaccgcgctggccgaccagatcaaggatttgcgcagcatggccagcaagcgtggcctggaagccggcacgctgcgcgaagaaatcaaccagagcctgaaaaccaccttcgatcgcaacagcaaagtgctcggtttctggctgtcattcgaacccaacggcctcgacggcaaagacagcgaattcgtcgatgacaaggcgcgcgcctccaacgaaaaagggcgcttctccagctattggagccgtgccggcggtgagggcttgaacaccatcatggtcgaagaagacctgaacaagaccagcctcaccctcaacggtacgccctacaacatctggtacacctgcccacgggacacacgcaatacctgcctgctggacccgtatgaagacacggtggcgggcaaaaaggtattgatgaccaccatcgcctcgccgctgatcgtggagggcaaactcatcggcgtcgtcggtgtcgacatcgccctcaccgccctgcaagcaaccgccgatgccgcacagaaagacctgttcaacggcgccgcacacctggaaattctgtccagcaccggtctgatcgcggcctatagcggcgaacccgccaaagtcggcaagaacctggtcgacaccctcggcgccgagggcaaggaaatcgtgcaactgctggccagtgacaaccgcatgatccgcgaacaggacggcaccatgcgcgccgtgtacccggtcaaaccgattgccgacgccaaaacctggggcgtggtgatcaagctgccaaaagcggtaatgctcgccgataacgtcaagttgcagggagtacttgacaacgctcaggcagccggcaccctcaaggccctgctggtagccgccgccgctggcctgctgggtttgctgctgatctggctgaccgccaccggcgtgacccggccgatcaacagcgtggccgccatgctcaaggacatcgccagcggcgacggcgacctcacccaacgcctggcctacgccaagaaggatgaactcggcgaactggtgaactggttcaaccgcttcctcgacaagctgcaaccgaccatcgcccagatcaagcaaagcatcaccgaagcacgtggcaccgcagaccagtcttcagccatcgcacgccagaccagcgaaggcatgcaggtgcagttccgcgaaatcgaccaggtggccaccgcgtccaacgaaatgagcgccaccgcccacgacgtcgccaacagcgcgtcgaatgccgccagcgcggcacgcggtgccgaccagtcggcgcgggaaggcatgtcgatcatcgagcagagcacccgcgacatcaccaccctggccgaagaagtcagcaaggccgtgggcgaagtcgaagcgctggcggtcaacagcgagcagattggttcagtgctggaagtgatccgcagcattgccgagcagaccaacctgctggccctcaatgccgccatcgaagccgcacgcgccggggaaagcggccgagggtttgcggtggtggccgacgaagtgcgcaacctggccaagcgcacccaggattcggtggaggaaatccgtcaggtgatcgaacgcatccagagcggcacccgtggcgtggtggcgaccatgcattccagccagagccaggcccagaacaatgccgggcagatccatcaggcggtgcaggccttgggcaagatcagcgatgcggtcaccgtgatcagcgacatgaacctgcagatcgccagcgccgccgaacagcagagcgccgtggccgaagaggtcaaccgcaacgtctcggcgatccgtaccgtgaccgaaaccctcaccggccaggccaccgagtcggcggcgatcagcagccaactcaatgcactggccagccagcagatgaagttgatggatcagttcagggtgtaaacccaatctcaaaaacaacacagttccaatgtgggagggggcttgcccccgatagcagagtgccagtgaacgcctctgtagctgacacacccccatcgggggcaagcccctcccacagttggttcactttggatttagagaccggtccaggcactgacaaactgcgtcaggtcttctttagcagcagtacgcggcgggttctgcggcgtgcccaggtacaggaagccaatcacctcctcatccgccgtcagccccaggcctttggccacatgggccgaataggacaactcaccggtgcgccacaccgcaccaatcccctgggcataagccgccaacagaatgccatgagccgcacaggcagcagccagcagttgctcggacttcggcaccttgaagtgctcctgcaaacgagcaataaccaccaccaccaacggcgcgcgcaacgggccgttctgggccttgtcgatcaccgcttgcggcgcatcggcgtcttgcagccgggccgcttcggccaacaaagtgcccatctgctcgcgggcagtgccttcaaccgtgaggaaacgccaaggccgcagttggccgtggtcgggcgcacgcatggcggcggcgaacagcacgtcgcgctgctcctgggtcggtgccggttccagcagacgcggcacggaaacacggttgagcaaagcgtcgagagcctgcatgggccacctccagaaaaaaatgtgcggtcattctagcgggaatgaatcgggatgccaccaaacgataattgctcttattcattgcgccctgccctgttagactttgcgaccctattttcagcagtggttcaggaaactcgatgttccgttcgctttttcgcctgtccgcagcattgctggccttgagcctggctggctgcgatgacgcgcccaggtttaccaaggccgagccgggtgaatcacgggcgggcggcgctgcgacggtgaacaagcgcgaccagaacgcgttttccctgccctcggccaacctgtcgcccacgcggcgcctggacttcagcgtcggcaacagcttctttcgcagcccctgggtgatcgcaccgtccaccaccacggcgcgtgatggcctaggcccgctgttcaacaccaatgcttgccagaactgccatataaaagacggccgtggtcacccgccgctgcccgatgcgcccaacgcggtgtcgatgctggtacgcctgtcgattccggatacgcccgcccatgccaaggccatcgagcagattggcgtggtgcccgagccggtctacggcgggcaattgcaggacatggcggtgccgggcgtgccgccggaaggcaaggtgcgcgtcgactacacgccggtcaacgtcaccttcaaggacggcacggtggtcgagttgcgcaagcccgacctgcagatcacccagcttggctatggcccgatgcaccccgacacgcgcttttctgcgcgcatcgccccgccgatgattggcctgggcctgctggaagccatcagcgacgccgatatcctgcgcaacaccgacccgaagaccgccgccaagggcgccatcatcggtcgcgccaattgggtctgggacgacgcccagcaaaaaaccgtgctcgggcgttttggctggaaagccgggcagcccaacctcaatcaacaaaatgttcacgcgttctctggtgatatgggcctcaccacgtccctgagaccctttgatgactgcaccgatgcccaagtcgcctgcaaacaggcccccaacggtaatggccccgatggcgagccggaagtcagcgacaacatcctgcgcctggtgctgttctacacccgcaacctggccgtacccgcgcgccgtggcgtcaacacgccgcaggtgctggccggtaaaaacctgttctatcaagccggctgccagggttgccacacgccagcattcaccacggccgccaatgccgccgaacctgaactggccaaccaggtgatccgcccctacagcgacctgctgttgcacgacatgggagcgggccttgccgacaaccgcagcgaattcaaggccggtggccgcgactggcgcacgccgccgttgtggggcatcggcctgacgcaaaccgtgagtggccacacccagttcttgcatgacggccgcgcccgcaacctgctcgaagccgtgctatggcatggcggcgaagcccaagcggcgcagcagcatgtgttgtccttcaatgccgagcagcgcgctgcgttgctggcgttcctgaattctttataagcttcgccccacttacagaagggagctcgacatgttccgtcccaagttgttgttcaccagcctggccgccctagccctcggcgcctgctcgccgcaagacccgcaagcggtgacctcggcggccatcgccaagcaagtgatcctgccgacctacagccgttgggtcgaagccgaccgccaactggccgtcagcgcgctggcctactgccagggcaaggaaagcctggacaccgcgcgtgccgacttcctgcatgcacagaaggcctgggccgagttgcaaccgctgctgatcgggccgctggccgagggcaaccgttcgtggcaggtgcaattctggccggacaagaagaacctggtcggccgccaagtcgagcaactggtcgccagccaaccgcagatcgacggcgccgccctggccaagtccagcgtggtggtgcaaggcctgtccgcctacgaatacatcctctacgacgccaagaccgatatcgccgacgacgcgcaaaaggcccgttactgtccgctgctggtcgccatcggtgaccgccagaaggccctggccgaagagatcctggccagctggaacagcaccgacggcatgctggcgcagatgaccaagttccccaaccagcgctacgccgactcccacgaagccattgccgatctgctgcgcgtgcaggtgactgcactggacaccctgaagaaaaagctcggcacgccgatgggccgccagaccaagggcatcccgcagccgttccaggccgatgcatggcgcagccagtcgtccctgcaaagcctcgaagccagcctggcggcagcccagaccgtgtgggtcggcgtcgacaacaaaggcctgcgtggcctgctgccgtccgagcagaagccattggccgacaagatcgacgccgcctatgccgcgtcgttgaaactgttcgccagtaaccagcgcaccctcaatgaactgctggccgacgacgccgggcgccagcaactcaacgatatctacgacagcctcaacgtcgtccaccgcctgcatgaaggcgaactggccaaggcgctgggcatccaactgggctttaacgccaacgacggtgactgatgatgctcaggcgacaggctttggccgttggtagcgtgctgctcagtgcactcacactgggcggctggacgctgttcaaaagcaaagacaagggcccgctgctgctctcggcgcgggatgatgcagacggcaagcactacgccgtgggctatcgcctggacggcaagccggtgtttgccacccaggtcggccagcgctgccacgacatcatcaaccacccgacgctgccgattgcgctgtttgtcgcccgtcgcccgggcaccgagagttacctgatcgacctgcgcgatggcgcgctgttgcaaaccatcacctcccacgtcaaccgccacttctatggccacgcggtcatccacaagagtggcgactggctgtacgccaccgagaacgacacgtccgaccccggccgtggcctgctcggtgtgtaccggttcgaaggtgagcggctggtgcacagcggtgaaatctccacccacggcatcggcccgcaccaggtgtcgtggatgcccgacggcgaaaccctggtggtggctaacggtggcattcgcaccgaagccgaaagccgcgtggagatgaacctcaacgccatggaaccgagcctggtgctgatgcagcgcgacggcaccttgatcagcaaggaaaccctcggccagcagatgaacagcgtgcgtcacatggggatcgccagcgatggcaccatcctcaccgggcaacagttcatggggccgtcccaggagcgctccgagttgttggcgatcaagcgtccagggcagccgttcgtggcgtttccggtggccgacgagcagttgcaggcgatggggcactacaccgccagcgtggcggtacacagcgaattgcgcctggtggcgttgaccgcgccgcgtggcaatcgcttctttatctgggacatggacagcggcgagctgcgcctggatggccccctgcccgactgtgccggcgtgggcgcggtcgaggatgggtttgtcgtgacgtcgggccagggccgttgccggttctacgattgtcgccagaaacagctggttgcaaaaccgctggaattgccggcagggctctgggataaccatctgcatctgatctgagttcgcgtcgcttttcacccgacacgagccggatgccaacccaaaaaaaaggcctcgcaacgcgaggccttttcattttggttttaaactcatcaactctgtggcctcatcccttgagacattccaaacatgaacagcaataactcatgatcaggcttggccgccgtgctcgctttggcaacgcgcggcaataggcattgcgcgccaccctgcgttgcactgagcacctgtgtgcgaggctgttcccacgccgccagcgccaaggctgcgatgcccagcgctccgaccaaaaacagacctcgtgctatttctagcttcatctggttaaacccttgatagcgctgccaaacgccgtctcgtaaaagtagctgagtttcttccagtcggtatcgttccacgacgaatggcggcgcaattgcagcatgtcatgggaggcggcccgataagcggtcaggcgctggcgacatttctcgaaatccagcagcgccacttcgacgttggccgagtcaccctcgcccgtcacccgcacgaagatgtgcttgatgtagaggcagccatgttgccatcggcccttgtgcatgcgcgccagggtgccggccagttccttgagtacacgctcatgcaccagttcgccgtattgctcgcggccaccggcggcgtaccagttctcgatttcgtcgaaaccgtcgagagccgcagtgaccaacagcgctttccattggtgctcggggtcgcggcgcgcttcgcaaaacaccatttccggcacacgcacgtccaaaaggcgcaggcccttgatcgcatcgcgctcgcgcagcaccgtcgggcggccaaacggatgcagccaactgcggtagatgtgcccggtctggcgtttgctgtagagcaagcggccgttggggctgatcacacgctgcacaccgctttcaccaccacgccgacggttgggctcttcgacccactcgccctgctggcgccagaaataatcaaagcgttcttcgggcgctacatgactgcctgctacgcactcaactgccatcctgttacctcttgcgcaatacatacactcgccacatggcgtagagcggtatgaagtccagggattcctgaacacgaaaaccggcttcctcaaattctgcttcaacagtagcagccggtaacacaaacctgttttggtaaccttcctgctcaccttttacacgacgttgctgttcaagacgcttgcgtttccaggccttgaaattgccgtctacccataacgaaataatcacgctgtcacgggtaacgcgttgaaactcccgcaatatggccatgcgatgtgccgggtcaccaatgtggtgcaacaggcgcatacagaaaatgctgtcgaccgcgttatcttgcagatcaatatcaaaggcagatgtctgcaagggccgtacccgtttcaccacatcggcgggctgagcggccatcgccaccttcaacatggacgccgaattgtcggcaccgatgatcacgcggttgggtttttccgccagcaagggccagaaacgcccagcgccgcacggcaagtccagcactaggccaggctcacccgccatcgccagcgcaccacgggccaattgctcgtcgcgtttgtgggacaaccggcgcgccagattgtcctgatgcttgagcaaatattcctgagcgtgttcgtcgtcgtacttttcggaaaattcgagcttgatcggatcagacatcaacggatctccagtagctgatgcctacaaccttaagcagcgcactgtgatcaacaggtcaacccgttgtgaaaaacttgtcctgtccaatctcatacatttcaagactttacagacacaagcgatagcatggggccatcttcgccgaattaccgggatctctggcaggatagcggcagggggtggagtcaggcgttgacctgactcaattgcacatgaaagcggcagccgttgggctccatggtgctgaggctgacgctccacccctggttctcgcagatacgctgcaccagcgacagccccagccccaggccctcaccgcgcttctcgctgccgcgtacgaacggctcgaacatcgcctcgcgcttgtcctcggggataccgacaccgctgtcctccacgataaatccgctcggttccagggtgagtcggataaacccctgctcggtgtagtgcagggcattgcgcagcaggttgcccatcaccgcatgcaggaaggtggtgttatagcgtgtatccaggggattgccgggctggtagatcagctccaggcctttgtgctcgatgggctcacgccagatgccgagcagatcatccgccacctgcgtcaggctgacctggggcgacatcgccgcgtcgttgtgctgggcacgggccagcatcaggaaggtctgcaccagttcgcgcatttcttcgcaggcccgagcaatgcgcaatacctggttgcgcccgcgctgatcgatagcggggttttccagcagcaattcacaggagctggccagtaccatcaaaggcgtgcgcagttcatggctcacgtcactggtgaacagctgttcacgggacagcgcctggcgcagccgtcccagcgtggcgtcgaacgccaccgccagctcacccacttcatccgcagcgtaatccggcgccagaggcggggccaagccgagcagttggtcgcggtgacgcacctggcgggccaggcgcaccaccggcgccattaccttgcgcgccagcacccagccgaggaacaccgccagcgccaggctgagcacaaagcccaccagcaccacggcgaacaacacgcgctcgcgctcttcgaaatcgctttgatcctgcaacagcacgtagcgccgcccatcgaccacttcgaccatggcgtggtacgacagcgcctcgcggaatacttcatggaaaccgggctcaaggtgacgcaggtccttgggcaactcgaagtcgccggggccgccgctgaaataaaatagctggtctggctcgggccggtgccgccagtcctcgacggtgtccatcagcagcaggcgttgcaagtcgccgcccaggcccgccgagatcaacttctcttccaccaggtgcaccgtcgcgacaatgcccatggcgaaggcccccgccaccaacgcactcatcaaggcaaaggcgatgatgatccgttgcgcaaggctttgcttaaactccatcacgaccctcggccaggcgataacccacaccgtgcaccgtttgcagcaacggcttggcgaacggcttatcgatcacttggcgcaattggtgaacgtggctgcgcaggctgtcgctgtccgggcagtcatcgccccacagggcttcttcgagaatttctcggcgcagcacgtgcgggctcttctgcatcaacaccgccagcagcttcaggccgaccgggttgagcttgagcaggcgcccttcgcgggtgacttccagggtatcgaggtcgtagctcagatcacccacctgcagggcgcggcgaccgccgccctgggcacggcgcagcacggcttcgatgcgggcggccagttccgacagggcaaagggcttgagcaggtagtcatcggcgccggacttgaagccctgtagccgatcgtccagttggtcgcgggcggtgagcatgatcaccggcgtatcgcggcgggcatcttcacgcaggcgcttgcacagggtgtagccatcgatgccgggcagcatgatgtcgagcacgatcaggtcgtaatgctcggtggcggccaggtgcaggcccgacaaaccgtcctgcgcacagtccacggtgtagcccttgagccccaggtaatcggccaggttggccagaatatcgcggttgtcttcaaccaatagaattcgcatgggcagtgtctccgtacgcggtaacggccgtgttggctcgcgcagcttaaggccaagtgtggctcagggatagacccgcaagggccgtcgataaaggttttcaaccgatattttagttgaacgagattttcactatagcttcacaaactgactacagtgtcagggcgaagatcgcgcccatcgatataaggaagttggacatggggtttctcaaaacagcgcctatgcgctatttgctgttggtcaccggtgcctggctggttgtgttcctgctcacgcgcagcgtgttgctcattactcacctggatgaagtcggtggcaacctgctgccggtgtttggcgtgggcctgctgtacgacctcggctttctggcctacgcggccctgccactggggctgtatctgctgctatgcccacccgccctctggcgccgtcgcggtcaccgctggttcctgcaggcggtgctgaccgtcagcctgttcgccatgctgttcacctcggtcgccgagtggttgttctgggatgaattcggcgtgcgcttcaactttatcgccgtcgattacctggtgtactccgatgaggtgttgaacaacgttctggagtcctacccgatcggcaagttgcttagcctgctgacgatgctcgccgttgtgttgagcctggccctgcgcaaaccgttcaacgccgcgatgaatgcaccgctgccgacaatgcggggtcgcctggtcaatgccctgggccttttgatcgttgccggcctcagcctgcaactgatcagccaggacagcccgcgcgcccaaggcggcaacgcctacaaaaacgagctggcgagcaatggcccgtatcagtttttcgccgcgttccgtaacaatgaactggactacacccagttctataaaagcctgcccgcggatgtcgtcgccaaacagttgcgcgccgaactgagtgagcccaatgctcgcttcatcgacaaggaccccttggatatccgccgcgccatcgacaaccccggcacgccgcgcacacccaatatcgtgctggtgaccatcgaaagcttcagcgccaaatacatgggcagcaacggcgacgagcgcaacctcacgcccaacctggatgcgctgcgcaagcagagcctgtacttcaataacttctatgccaccggcacccgcacggatcggggcctggaggccatcaccctggcgatcccaccgacaccgggccgctcgatcgtcaaacgcatcggccgcgaaagtggcttcgccagcctgggccagcaactcaccgccatcggctatgacagcgtgttcgtctatggcgggcgcggttacttcgacaatatgaatgcgttcttcagcggcaacggctatcgggtcgtcgaccagagcagcgtgcccgaatcggagatctcattcaaaaacgcctggggcatggccgacgaagacctctacaaacaaaccctgaagctggccgatgccgactacgccaagcagcagccgttcctgctgcaactgatgaccacctccaaccatcgcccctacacctacccggatgggcgcatcgatatcaaatccggcaacggccgcgacggcgcggtgaagtacaccgaccacgccatcggcgaattcctggaggcggcacgccagaagccgtggttcgacaacacgatcttcgtgttcgtcgccgaccacactgccggcagcgcgggcaaggaagacttgcccatcagcaactaccagattccgctgttcatctatgcgcccaaactggtcgacgcccgggaaaccgcgcaactggccagccagatcgacctggcgcccaccttgctcggcctgctcaacctgagctacgaatcgaccttcttcggtcgcaacctgctgcaagacaacccactgccaccgcgtgtggtggtcggcaactaccagcacctggggctgtttgacggcaaagacctggcgatcctcagcccacgccagggcctgcgtcgccacgatcaggccctgggtgaaagccaggagctacgggtgggcagtgatgacccgctgatcctgcgcgccatcgcctactaccaagctgccagctatggcttcaaacagcagttgctgggctggaaagcgccgaaggtcgcagaacccgccgtcagcgcccgctgatcgccacgcgtggcccttgcctcctgcggggcaagggcgtaacacttgcgcccattctccggcgacgacgccctttcatgtccgacaccctgctgctgatcgaagatgaccgcccactggccgcgctgacggcggagttcctgcgcgccgagggattcaacgtggcggtggagcaccgtggcgaccgtgccgcccagcgcattcttgacgaacaaccggcgttgttgatcctggatgtgatgctgcccggcatcgacggttttaccctgtgccgacagatccgcgagcagtaccccggcctgatcctgatgatgacggcgctggacgaaaacgccgagcaattgacggggttcaacgttggtgcggacgattacgtggtcaagccggtcgacccgctgttgttgctggcgcgtatccgctcgctgctgcgtcgccatccccaggcgccccgtgcgtcttaccaatggggcacattccgcttggacctcaacggccatttcgcctggctcgacgaggtgcccttgcagttctcggtggccgagttcgagttgcttgcgatcttcgcccgccactgcggtgtgttgctgacccgggaaaaactcctgcaaagcctgcgcggcctggagtacgacgggctcaatcgctcggtggatatgcgcgtgtcacgtctgcgcaaaaagctgatgagcctggggtgcccggtgacgatccagaccatcacggcccagggctacctgtttgtcgaaacaccgcaagaggcccggcatgttctctagagtgcgaccctggatggcgattctcgcgggcactggctggggcgcattcaccctgtatttgctgtggctgtgcgccaatgcctcggtatttgtcggcgaatacagctttttgcgcttgatggccgggccgggctatctggtggcggagcaactcaaggccctgccggccgaccagcgtgaagcccgtatggaggtactgcgcgcgcgcttccagtacccgatccgcctcgtcaccctgggcgaggtcgaactgccgcccgaagccctgatcatgctgcaacaccagcaaccggcacagagcagcgatgaagacatcacctatttcccattcgatgacaaaacgctgatccaattcggtccgatgtggggaaccgccgaggtcaaggacctgctgcaattcccggtgtatgggatcaccgcgtgcgtggccgccctgccgctgttgctgtggatgtggttcggcctgcgtgcacgccgccaacgaaatgctgatctgctggtccttgatgcctgcctgggcaccctggcccgcacgcccaacgcgatgctgccggccatgggcaaggaatgggcgcccgtgctgcagaccttgcagcaacatgcccaagacatcaccgccatgagcgaacgccaccgggaggtttcccaggccgtctcccatgagttgcgcacaccgttggcccgcatgcgcttcgctttgaccctgctgagcaaaagcgacgatcccgccacccgcacgcgcttgcaggaacgcctgcaaaccgatgtggaagagcttgaagccctggtgcgcgccagcctggcctttgcccgcatggccggcgcgcccaccgacctgcagcatgagcccatccctatccgtgactggttgcatcaggagtttgccttgctcgacgggcatcagcggcgcctgagcctggacaccgagccggcggacctgcaactgatcggcgaccgcgccttgttgcacttgatcgtgcgcaacctgttgagcaacgccatcacctacgcccgcgaccaagtgagcgtcagtgctgcccagcaggatgaccaacacctggtgctgcatgtggacgacgacggccccggcatactcgccgaaaaccgcgaaaagattttcgaaccgtttgtgcgactggccatgggcggcgatgagcccggcggcttcggcctcgggctggcactggccaggcgcgccacccaatggcatcgcggtgagctgtctgtggcgcgcagcccgttgggcggggcacgcctgaccctgatcctgccactgcgcccccagtaaccttcgtgttacagcctgtgacagtgaaccgctggcattctccgtaatctcgccacctgatccagggttgcccctgcgccctgggtccccgtcctttggacccggttggagagcccgttcatgcgtcccccaaaacagcatttacccacgttgatgctatcgctgtgtatcgtcgccagcgcgctgctgaccagccaagcggctgccgtgagccgcgcagcgcctgacttcactggttcgatcaagtcgcccggctacgactcccacacccttaaactgctgggcgaggtgaccatgtccagccgctggcggcggcccatacccaggccacgcactaaagccgcgactctgtctgcccaagggccgctcggccacacgtctgcaccgtggtcctctgcacgtgtgccctcggcgcttgccagagggatgaccttcaagaggctgttgcgacgcggcggcatgggctgaacgctcaaccaagcataaaaaaaccccgcctgcatcactgcaggcggggttttttatgagccgggtaaggctggcttacatcatgccgcccatgccacccatgccgcccatgtctggcataccgccgccagctgcgccttcagccttaggcttgtcggcaattgcagcttcggtggtcaggatcagaccgccgatggaagctgcagcttgcagcgcggaacgagtcaccttggttgggtccaggatgcccatttcgatcatgtcgccgtagacgccagtcgcagcgttgtaaccgtagttacctttgccgttcttgacttcattgaccacaacgcttggctcgtcgccggagttggcagcgatctggcgcagtggcgcttcaacagcgcgacgcagcacagcgataccgacgttctggtcagcgttgtcgccggtcaagttggtcagggcttccagagcacggatcagcgcaacgccaccgccaggtaccacgccttcttcaacggctgcacgggttgcgtgcagggcgtcttcaacgcgggctttcttctctttcatttcaacttcggaaccggcgccaaccttgatcactgcaacgccgccagacagcttggccagacgctcttgcagtttttcacggtcgtagtccgaggaagtttcggcaacctgggcacggatctgagtgatgcgcgcctggatgtcctgctcaacgccagcaccgtcaacgatgatggtggcttccttggagatggtcacgcgcttggcgctacccaggttttccagggtggcgctttccaggctcaggccgatttcttcggagataacggtaccgccggtcagaacggcgatgtcctgcagcatggccttgcgacggtcgccgaagcctggcgccttgacggctgcgactttaacgatgccacgcatgttgttcacaaccaacgtcgccagggcttcgccttcaacgtcttcggaaacgatcagcagtgggcggccggctttggcaacggcttccagcacgggcagcatttcgcggatgttggagattttcttgtcgaccagcaggatcagcgggctgtccagctcggcaaccatggtttccggcttgttgacgaagtacggagacaggtagccacggtcgaactgcatgccttctacaaccgacagttcgttttccaggccagtgccttcttcaacggtgatcacgccttctttaccgactttttccatggcttcggcaatgatgtcgccgatggagctgtcggagttggcggagatggtgcctacctgagcgatagccttggtgtcggcgcatggcttggacaggtttttcagctcagcaacgatggcgatggtcgccttgtcgatgccgcgcttgaggtccatcgggttcatgccggcagcaacggccttgtagccttcgttgacgatcgcctgggccaggacggtagcggtggtggtgccgtcgcctgcgtcatcgttggcacgggaggcaacgtctttgaccagctgcgcgcccatgttttcgaaacggtcttccagttcgatttctttggcgacggaaacgccgtccttggtgatggtcggagcgccgaagctcttctcgatgatcacgttacggcctttcgggcccagggtcgcttttactgcgtcagccaggatgttgacaccggtgagcattttcttgcgggcggaatcgccaaatttaacttctttagcagccatgatcgataatccttaaatactttggagtaacgggaaaatgagcggggaaattacgcttccagtacggcgagaatctcgttctcagccatgaccagcaggtcttcgccgtcgattttcacagtgttgctgccggagtaagggccgaatacaaccttgtcaccgactttaacggccagagcacgcacttcaccgttttccagggtcttgcctgggccagcagcgacgatcacaccgtggttggctttttcagcagccgaacctggcagaacgatcccgccggcggttttcttttcttcttcgctgcgacggattacgacgcggtcgtgcagaggacgaagcttgctcattgtcgatctctcctaattgtgtttttcatcggccggtgtctgtaccggcgggttgtattccggctgtgccggtcgcgcctcgccaagcaagacgcggaagtctgtctggtgtcgccaccagaaaccttgcggtgaccgttacataagggcgcataagcttattacaaggggccgcggcggaaattttttgcaggcgccgacggttgaaagcaacacggcacccgaaggtgccgtgccaatgaagcggttatttgctgtcgcggtgttcgaactcgccttcgatcacatccccttcacgccccagcggctggcgtggagccggtccgccacggggttgcaggtcgtcggcaaaggctcgctggcgaatcgccgcctcttcggcgcgctggcgcatcttgccggccagcagcttgcgggtgaacggcagcaacatcaccagacccaccacatcgctgatgaagcccggcaggatcaacaggccaccggccagggccatcatcaggccttcaagcatggtctgtgcgggcagctcgccacggttcaggctttcacgggcacgcagcgccgtggccaggccggcgacgcgcagcaccagcacgccgagcatcgagccgagaatgatcagcaacagggccgggaaaaacccgatcgcgctgctgacttgaacgaatacgaacagctccaacaccgggaacagcagaaagagcaataaaaaagggcgcatcaaatggttcctcaacgcaagaatgccttgccagtccaccttagatgacgtcgccgtttcgtgaattcaagcgtcagcagtggcttttttcggccaggcctcggcatgggccaatgaaaccagggcttcgcgtacttgtgtcggcgtgttgcaaggctccgcaaacggcaaccaatataaggaatggccgatacgcaagtgcatgccttcgctgtcgatgccggctaattgagcgggctcggaagtcggcaaaccgccgagatcgacgtaatgggcaatggccttggtgtgatcgctgttcatgtgttcgatcatgctgcgctcggccttgccggcgaacggattggccaggttcaactggtcgatccagtgaatcgccccaaagccaccgatgtaacggtggcgtacgggcttgagtacccagaagtcgaagtcgtgggccttgtggtagttggcggagtccgggaagtagcggtagtaacgctcggccgccgcctcgatggccgcgccctcctccagcttttccgcttcggccaggtaggtcaggcgcccgacggcctgcacgtcatcggcctcacgctcaccgaccagcaacgaacacttggggtctttctgcaggttatgggtgtgctgtgcgatgcggctgatcaggatcaacgggcgaccctgctcgtcgaggcaatacggtacgaccgagccgaaagggaagccaggcatggctttggataaagtggagagagccccacggtattccttgagcaacagctctcgggcgttcttggcaacctgtgcgctcaacgtatgactcctcgggtattcagccgcccatggcatatgggaatggatctcaacgcaaggtaatcatatccgcaaaggttgccaagcaggttttgtgcgcccgtgttaccaggccacaccgaaaccagcggtgtagcgggtcttgctcaggctgctctcggagtcgccgctgatgatgtcgcgctcggccttgaggttgagggaggcccattcggtgactttgtagcgcaggcccatttccgcatccagggagtaatccacgggcccatcaatcggccggcccagttcaccattggtgaagaactcaaccgtcttgcccaccaggtagcggttgtagttccacttcatggccaccgagtagaagttgtctttgccaccctcggcatattcatagtcagtgcggttgaccagcgaaccgagggagaacgcgcccagttcatcatcccagaactggtagccggggccggtgccgacggtgcgctggcgggacaggtcttcgaccttgtcgcgcttgtaggtcaagcgtccctgccagaaccaatgctcggtgaggaaacggtccaggtcgtattccagggcccagttgtcggtggtggtgacatcgtcctggaactcacggttgtattcgccctggccggtgtggcgccactggccatgccgcgccgtggtcttgaagtcgatgtcgtagtcgttggtgtctttttcggcgcgcttgtagtccagcgccaggtcgacattgcccttccacaccaggtcttcgatcaccggcttgggcttgatgatctgctggatgcttgccaagtccaccgtcttgggcgcctcgccgttggccagcaccaccttgccatcatccgctgccttcagagacttggccttctcgccggtgtaggcgtcctgtttgaccaataattcctggtcgctctccagggttttcacctgcttccagtccacggggatggcaccggcgtagtcggtctggatcagcaatttgccgccatcgaagactttgatcttgccggtcaggcggtcaccgttcttcaaccagacggtgtcggccagcaagggcgtggaggcgctgaaaacagcaaggcacagcagggttctggacaacataagcgggtatggggctcaaggttggcgaaaaggaggcattatcgtgttagatagctaggactgactcaagtatcggggtcgagttcaatgctcatcgccatgtttacagacgtttcttacaaaaatgccgacgatttcaacggatagccgcgcaatgaatcaaccagccgagtcgccgcaaagccctgccgagatgcgccgtactgcgctgtacctgaccctggcacaagtgccaccaggctgcgtggtgagttacggcgagctggctcacctggcgggcctcggccgtgctgcgcgctgggtgggtcgtacgttgagccaactgcctgaagacaccaggctgccgtggcaccgtgtgctgggtgccggtggtcggataagtctgccggtgggcagtgcttcaggcgacgaacaacgggcgcgtttgcgcgacgaaggcgtcacggtccgcaacaatcgcgtggatattcagcgccatggctggcgcccggtagagcacagcggttagagtgcgcgctttgtttccgcaaatctgaggcagactccagcccatgccccgtaaaacctggcgcgccgcgctcgctgcctatgccagcccttcgacgttagtcctgttgttgctcggctttgccgccggtctgccttacatgttggtgttctcgacgctttcggtgtggttgcgcgaagccggtgtggcgcgcgagaccatcggctatgcgagcctgatcggtttggcgtatgcctttaaatgggtctggtcgccgctgctcgaccaatggcgcctgccactgctcggtaaactcggacgccgccgttcctggctggtgctggcccagtcgctggtgatcctcggattgatcggcatgggtttctgcgacccacagaaacacttgtcctggctgatcgctatcgccgtcatcgtcgccttcgcctccgccacccaggacatcgcggtggacgcctaccgcctggaaatcgccgacgacagccgccaggccgcgctggccgccagctacatgtccggttatcgcatcgccgccctgctggctacggcaggcgcactgttttttgccgaagggttcggctccaccggtttcaactacaagcactcggcctggaccggcacctacgtgctgttcggcgtactgatgattccggcgctgctgaccacgctgttcatgcgcgaacctgatgtgccactgcgcacccagttgcaggccgggcgctacagcttcgtacaccaactggcatcggtgtttgtgctgatcgtgctgctggtatcggtaccggcgatgtttacccagttgttcaacacggacttcggcagcgtgatattccacggcgtgagcctgtgggacctgctgatggaagaccgcgccttcctgcgcgccatcctctatataaccctcacgtcgctgtgcctgtcggccatgggtcgccggggtctagcgccggtgctgacaccggtcaacgacttcatcctgcgttaccgctggcaggcattgctgttgttggggctgatcgccacctaccgcatgtccgacaccgtgatgggcgtgatggccaacgtgttctacatcgaccagggcttcaccaaggaccagatcgccggcgtcagcaagatcttcggcctgatcatgaccctgctgggtgcaggtatgggcggcctgctgattgtgcgcttcggtatcctgccgatcctgttcatcggcggcgtggcgtcggctggcaccaacctgctgttcgtgatgctcgccgacatgggcccggacctgcagatgctgatcttcaccatttccctggataacttcagctcagggctggcgacctcagcgttcgtggcgtacctgtcgagcctgaccaacctcaagttctccgccacccaatatgccctgctcagctcgatcatgctgttgctgccgcgccttatcggcgggtattcgggggtgatggtggagaagttcgggtatcacaatttcttcctgatcacctgcctgctgggcgtgccgacgctgttcctgatcgcgttgcactggttccaggaaaatcggcgggcgcggttgagtccaccgaccgaagactgacaatgagggaggggcttgcccccgatagcaggttgtcaggcgcttatgtgttactgatccaccgctatcgggggcaagccccctcccacatacccctctgcgttctgatgcctgtactccagcagccggcgcccgtacaatcccaagtcatttcaagtccaagcaaccgacaacggcctaccatgcgtaccagtcaatatttgctcgccacacagaaagaaacgccttccgacgcggtcgtgatcagccaccagctgatgctgcgcgccggcatgatccgcaaactggcctccggcctctacacctggctgcccatgggcttgaaggtgatgcgcaaggtcgaagccatcgttcgtgaagaaatgaacgccgccggctctctggaagtgttgatgccgagcacccaaccggctgaactgtggcaggaatccgggcgctgggaagagtacgggcctgagttgctgcgcttcaaggatcgccatggccgcgatttctgcgccggcccgacccacgaagaagtgatcaccgacctgatgcgcaacgagctgagcagctacaagcagctgccgctgaacctgtatcagatccagaccaagttccgtgacgaaatccgcccacgcttcggcttgatgcgcggccgcgaattcatcatgaaggatgcctattcgttccacgctgaccaagcgtccttgcaggtcacctacgaccgtatgcaccaggcctactgcaacgtgttcacgcgcctgggcttgaagttccgcccggttgaagccgacaacggctccatcggcggcgccggctcccacgaattccacgtgctggccgagtccggcgaagacgacatcgtgttcagcaacggttccgactacgcggcgaacatcgagaaagccgaagccgtgccacgggaaacttcccgtccagccccggccgaagagctgcgtctggtggacacgccggataccaagaccatcgcggccctggtggaaaaattcaatctgccgattgaaaagaccatcaagaccctgatcgtgcgtgccgaggaagaaggcaagctgattgccctggtgatccgtggcgatcacgagctcaacgaaatcaaggcggcccagcaacctggcgtggccagcccgctggtcatggccaccgacgccgaactgcgcgacgccattggcgccggtgccggttcgctcggcccgctgaacctgccgctgccgatcatcatcgaccgttcggtcgagctgatgagcgacttcggtatcggcgcgaacatcgacgacaagcactacttcggcgtgaactgggaacgtgacctgccggtgccgaccgttgccgacctgcgtaacgtggtagctggcgacccaagcccggacggcaagggcaccctggaaatcaagcgcggcatcgaagtcgggcacatcttccagctgggcaacaagtacagcaaggcgatgaagtgcgaagtgctgggcgagaacggcaagccgatcaccctggacatgggctgctacggcattggcgtatcccgcgtggttgccgctgccatcgagcagaacaacgatgacaaaggcatcatctggagtgacgccctggcgccgttccaggtcgccctggtgccgctgcgttatgaaaccgagcaagtacgcgaagccaccgacaagctgtatgccgaattgacggctgctggttttgaagtgctgctggatgaccgggacaagaaaaccagcccgggcatcaagttcgccgacatggaactgattggcatcccgcaccggatcgtggtcagtgaccgcggcctggcggatggcaatctggaatacaagagccggaccgaagccgaagcccaaccgttgccggtggctgacgtgctgtctttccttcaggcgcgtattcgtcgctgaaaaccagatcaagagaagtcatgttcaagcgaaacaccagagccctggggggcgccgccttgtgcggcgccctgctggtcagcggctgcgccaaccagatgtcgcaacgcagtgagcacgaagagcgagtcgagcgtaagttgctcgaccacagcctgcagatcgatgtaggcgagcccaaagtgctggagctgccgcaacgccgggttcgcattcacgagcagaagaccttcgaggtcaccgagttcgaagtcacccgtcgttacgaccgctataccccctaccagccctggcgcaagctctacgagatgccattgggtgcggttgccctggtggcgggcgcgggtgccaacgtggcgaatatcttcgccctcggccacctgccgaccagcatgacccatgactggctgacctatggcgtggacggcctcaacccgttcatgaacgtgcaatcccacggccgtgcacaacagaacctggcgggtatcgatgaagtccagcgcgacaagcgcgtggagtattcgagcctgccctggagcgagcgcccggtgcaggtcaccgccggcaagcagacccatgagctgaccaccgaccgcaacggcgtcctgcgcctgaacctgttggacagcccatttgccgagcaggacctaaaccgcgtcaccaccttgaagatcagcgtggaagatggccaggacgatgtgcattcggactcgaccctggcgatcagcaacaccctgcgcggcaagttgctcgaagcccacggtttgatctacgacgatctggaagacgatgaagtcagccagtgggtgcaccgggtcaagcgcttgtcggagctgggcctggaagaagaggccagtgagctggagcaaagcctgatcgaactgacgcgcaatgatcccgagttgcagcaagagtttctgcaggcgctgaccaaggatgcggggcggctagtcgcagatcccggcgcacgctgagcccctcaaattgttgccggtcaaatgtgtgagggggcaagccccctcccacatttgctcccgatttttaccaggaaaattcgagctgctcgttgccattgctcaggtccaacaaccgcacaccaatccccaacaagcgcaccggcttgcctccgcggttgaacgcctgcgtcagcagctgttgataactctctagatcccgccctgccccagcctgttccagtgtggtctgggtaaagtcatgaaacttcaccttcacgaacggcttgcccgccctgtaactgctatcgatgcgcgccatgcgcccggccagggtttccatcagttcgggaagtttggccaggcagcttgagaggtccggcaggtccacgtcataggtattttccacactgatcgattgtcggcgactgtcgttctgcaccacacggtcatcgatcccacgcgccaggctccacagccgctcgccaaaactgccgaattcgcgcaccagcgccagcttgttccactcgcgcagttgcaggcagtcttcgatgcccaggcgtgccagtttatcggccgtgaccttgcccacaccgtgcaacttgctgacccgcaactgtgagacaaagtcttcgacctggtccggggtaatcacaaacaggccgttgggtttcttccagtcgctggcgatcttggccaggaacttgttcggcgccacgcctgcggacacggtgatgtgcagttggttggagacacggcgacgaatgtcctgggcgatgcgcgtggcgctgccgccaaagtgcgggctgtcggacacatccaggtaagcctcgtccaacgatagcggttcgatcaggtcggtgtagtcgcgaaagatcgtctggatttccttcgaggcttccttgtaggcgtccatgcgtggcttgacgatggtcaggtccgggcacagcttcaaggcatgccgcgacgacatggccgagcgcacgccataggcgcgcgcctcgtagttgcaggtggcaatcacgccgcgccggtccgccgagccgcccaccgccagcggtttttgcgccaggctcgggtcatcgcgcatctcgatggcggcgtagaagcaatcacagtcgacgtggatgattttgcgctgcgtcatataaacggggtgtgtacctacgggtggccagtatcgcattcacacctgtatatagcaccagtagtttgaatcttccgctcaagcggtaggaaaattccaggatgaatttattttctcaatcggatttggccttccgatagagctgaaagcctcggccagactgggcccgcggggtatcaaggggcctttatggagagctaagcgattgaaccacaagcgcttttctttaattcacaggttgacagaccggcgttcctctgtagaatgccgacacacagacgcgggatggagcagtctggtagctcgtcgggctcataacccgaaggtcgtcggttcaaatccggctcccgcaaccaaacatcaaaaaaggctactcgaaagagtggccttttttgtgcgtgcctgttttgtcctgtacgaaaattgtaagacaaaaaaatctttgcccttcgcgcacttacggtgcatggccgacattcaacggctaattcacacttatttgacccatcggctcattaacggttgacacctcggcgctgaactgtagaatgccgcccacagacgcgggatggagcagtctggtagctcgtcgggctcataacccgaaggtcgtcggttcaaatccggctcccgcaaccaaacctcaaaaaaggctactcgaaagagtggccttttttgtatctggtgaaaaagttcttctgaaacaatggcatggcatctttcatgaaaccgcacacggtttgtagagtccatctcattgcaagctatgctcaatgctcaagcgctgccctctacgaccaatggccgcagtcgccgcccccggcgatacgcgttaatatttgtaattattttgtccatagggattggtaacttggctggatacctccatcctgtcgcgcacaatccacgaggtgattgatgcgcgccaactcgtctgaaccacaagacaccgtcacagcagaacaaccgatcacacccacccgcttgcgctggctggatctggtgagcaagtaccggcaacctatcgggctggccgtcaccttattgctgtttgccattgccctgatcgcctgccgccacctgctgctggagctggacctctacgccctccacgactcgatcctggaagtgcccaagccggccctgctcggtgcgtttgccgcagccattgccggttttgtcattctattaggctatgaattctccggcgcccgctatgccggcgtaaacctgcccgccaagaccctggcccttggcggctttaccgcattcgccatcggcaatgccattggcctgtcgatgctttccggcggatcggtacgctaccgtttatatgcacgccatggcatcggtgcatccgaagtcgcccatatgaccgtgttcgccagcctggcgctgggcactgccctaccgccactggctgcattggcaacactgagcaacctgcccgccgcatcgacctacctgcatttaccgcaagcggtgctgggcggtattgccggcgcggtgctgctgttgtcggcggtgttgtgcatcggcatttatcgccgtcgcctgccggagcaaccctacccggacaacctgttggtcaaagccggccgccgcaccttgcgcctgccgggccgtcgcctgaccttcctgcaactgatcattaccgcactggacgttgccgccgccgctaccgtcctttatatgctgttgcccgaggctccgcccttcggccccttcctgctcgtgtacctgctggcgctggccgccggtgtactcagccatgtaccgggcggtgtgggtgtattcgaagcgatcctgctggcagccttcgccgacaaactgggcgccgcgccactggccgccgccctgctgctgtaccgcatgatctacgtggtgctgcctctgctgatcgcctgcgtgttcctgctggtcaacgaagcgcagcgcctgttccagacccagcaaagcctgcgggtcgcctcggggctggcggcgccagtactggccgtcctggtttttctgtccggcgtggtcctgctgttctctggcgccacgcccgaaatcgactcgcgcctggaaaacatcggcttcctgattccccaccgcctgattgacgcctcgcactttggcgccagcctgatcggcgtgttgtgcctgctgctggcccaaggcctgcgtcgacgcctgtcggccgcctggatgctgaccatggtgctcttgctggcgggcgccctgctctcgctgctcaaaggcttcgactgggaagaagccagcctgatgaccatgaccgcgatcctgctggcgatcttccgacgctcgttctatcgcgccagccgccttaccgagctgccgttctcgccgctgtacctggtggccagtgtctgcgtgctcggggcgtcgatctggctgttgctgttcgcctatcaggacgtaccgtacagccatcagctgtggtggcagttcaccctggacgccaacgccccccgtggcctgcgctcgctgctcggcgccgccgtgttgctggtgatcgtgtccctgacctggctgctgcgtaccgcgcgcccggtgatccatttgccgacacccgatgaactggagcgcgccagcaaaatcctgatggcctcttcacagcccgacggcggcctggcgctcaccggcgacaaggcgctgctgttccaccccaacgacgaagccttcctgatgtacgcccgtcgcggtcgcagcctggtggccttgtacgacccaatcgggccaacccaaccccgcgccgagatgatctggcagttccgtgacctgtgcgacatccaccacgcccgcccggtgttctaccaggtgcgtgcggagaacctgccgtactacatggacatcggcctcaccgcgatcaagctgggcgaagaagcccgcgtcgacctgaaacgctttgacctggaagccaagggcaaagagatgaaggacctgcgctacacctggaaccgtggctcgcgggacggcctgtccctggagatctgcgaaccgggcaccgcgccgatggacgagctcaaggtgatctccgatgcctggctgaccggcaagaacgtgcgggaaaagggcttttccctgggacgcttcagcgacgactacctcaagcacttccgcatagcgatcattcgcttcgaagggcgcccggtggccttcgccaacctgctcgagacctacaaccatgacctggccagtctcgacctgatgcgcgcccacccggacgcgcccaagctgaccatggaattcatgatggtcggcctgattcaacattataagagtcacggctacgcccgcttcagcctcggcatggtgccgttgtcgggcctgcaaccacgacgcggcgcaccgctgacccaacgcctgggctcgatggtgttccgccgtggcgagcaactgtataacttccaaggtttgcgccgcttcaaagacaagttccagcctgactgggaaccccgttacatggccgtgcccgcaggacttgatccgctggtggcactggccgataccgccgccctgatcgcgggcggcttgactggattggtgaaacgctgatgattcgacgctcctggcggtatgtattggcctttgtagtgctgctcgccctgttcctgggtggcggctattggtactggaaccgccctgccccacaaccggtgctggagcaactgccccaggccgacggttcggtcatgacccgcgtgacccccaacggcacgccaaaagcccgcgtggccgtggccgtgatggccgatgaaaccctgaccgacagtcaactgattgccttgagccaaggcggcaaggcgcagattgtccaggtgatcctgcccaaggatgactgcaaactgcaggaacaagcgctgcaaagcgccctgggccagctcaagggcccggcgacgctggttagtggcatcggccccggtgcaagcctggcctggcgctggctggcggcacagaccgacgacaaggccaacgccatctccgtcggcttcgccatgacccagccaggctgcaccgacccgctgccgaaaacctccgcccacggcaactggctggtggcctggaacgacaaccctgaggatgacgccgccagtttcgtccgtgacacaccgcgtgccaccaccagcatcagtgactacgacattcattacccgcaagtgctgaacaacgagttgcgcaagcaactggtgggctcggacaacggcggcctggcgattccggtggttgaagtaccggccggccaggccaaggacactgtcaccctgttcctgtccggcgacggcggctggcgcgacctcgaccgtgatgtggctggcgagatggccaagatcggctacccggtggtgggcatcgacacgctgcgctactactggcagcacaaaaccccggaacaaagcgccaaggaccttaccgagctgatgcagcactaccgtcagaaatggggcaccaagcgcttcgtactgaccggctattcgttcggtgccgatgtattgccagccatctacaatcgcctgccggagaacgagcagcagcgtgtggacgcaatcatcctgctggcgtttgcgcgtacgggcagcttcgagattgaagtggaaggttggctgggcaatgccggcaaagaagccgccacgggcccggaaatggccaagctgccggctgacaaagtggtgtgcatctacggcgccgaagaagtcgacgagagtggctgcacggacaagacggccgtaggtgaagccgtcaagctgccaggtgggcatcacttcgatgagaactacccggcgctggccaagcggttggtggatatcatcgtgaaacaccagaccaaggataaagccgagtaactccagctattacatggcttaaaatgtgggagggggcttgcccccgatggcggtgggtcagctacagataagctgactgaagtgccgctatcgggggcaagccccctcccacatttatatttgcaatgttgtttagattcagcgcggttcgatatgcgcgatcatcaattgcacggtttcattcccgcgaaactcgttcacatccagcttgtaggccagctccacccagcgcaccgtcgggttcggccagatctcccggtccaccccaaacgcaatgccatcgagcttcaccgagccgcattcgctcttgagcacgaccttcaagtgccgctcgcccaccacgcgctgctccaccaactgaaacacgccgtggaacaacggctccggaaagtgctgcccccatggcccggcatgtcgcaacgcgcgggccagttccaagtgaaactcttccaccgccagtgtgccgtctgacagcagacgaccggtcaggtcttcttcgcgcagttgccgacgcacttcggcatcgaaggcttcggcaaacagcggaaagttttcctcgggtaatgtcagcccggccgccatcgcgtgaccgccgtatttgctgatcaggttcggatgctggctggcgaccaccgccagggcatcacggatatgaaaaccctgcacagagcgcccagagcccttgagcaaaccgtcgccagcgtcggcgaaggcaatggtcgggcggaagtagcgctctttcatgcgcgacgccagaatcccgatcacaccttggtgccattccgggtcgaacaggcacaaaccgtagggcatcgactccaccggcaagtccttgagctgggccagggcctcgcgctgcatgccttgctcgatggatttgcggtcctggttcatgccgtccagttgcgcggccatttcacgggcagcggccacgtcggtggtgagcaggcattcgatgcccaggctcatgtcatccaggcgtccggcggcgttcaggcgcggcccgaggataaagcccaggtcggtggaggtgatacgtgcggcgtcgcgcttggccacttctaggatcgccttgatccccggccgtgcacgaccggcgcggatacgttccagcccctgatgcaccaggatgcggttgttggcgtccaggggcactacgtcagcgacgctgcccagggcgaccaggtcgagcaactcgccgatgtttggctgtggcttgttctcgtaccagcccaaactgcgcaggcgcgcacgcaaggccatcagcacgtagaagatcacgcccacgccagccagcgccttgctcgggaattcacagcccggctggttcgggttgacgatggcatccgccgccggcaactcgtcgccgggcaagtggtggtcggtcaccagcacctgcaaccccgccgctttcgccgctgccacgccttcgacgctggagatgccattgtccacggtaatgagcaactgcggctcgcgctgcaaggcaacggcgacgatttccggggtcaggccgtagccgtattcgaaacggttgggcaccaggtaatcgacatgggccgcgccgagcaagcgcaggcccaaggtgcccacggtgctggcggtggcgccatcggcgtcgaagtcaccgacgatgaggatgcgttggcgttgctccaatgctgtcaccagcaggtcgaccgccgcgtcgatgcccttgagctgctggtagggaatcaaccgcgccaggcttttatccagttcggcctcggacagtaccccgcgcgcggcgtaaagacgggtcaacagcggcggcaattcaccaagaaacggcaggacggcgggcaacgggcggggatcgatacgcatggggtgacggatacttctcttctgatacggaaataaaacaggtgaccggcggcgatccaatcaaccgcgttcgccaaccagccactgcaactgcacttcatgctggccgcggtcgtcggtgacgaagatcgtgccttcgctgatcatcacatcccacttgataacacgcggcatgtccttggccagggtctcaaggacttcctgcggcacggcggcgatgtgtacgtttttcaggttgttcgccaccggcaccaccttgccttcccacacacgcaggctgccgtaggccagcaggctggtgcgttcagtgcggcgcgagcaccaggtgaggcggtccgcatcgggctggccgacttcgatccagtgcaacacccggtcatccaggcttttttcccacaaggctggctcgtctacatctgataggccacgtccgaacgacaactgctcgttgtaccagagggcgtaggccagcagacgcacggtcatgcgctcttcggtttccgacgggtggcgggcgatggtctgtttgacgctctcgtacaccgagcgatcgaggtcggtgaggttgagttcgaatttgtaggtcgtggacggctgggccatgaacgggcttctagagacagggaaaggcggccagtctaaccgatgacgaggccaatcaacgaatccagcgctgccctgggctgctcgcctatgttaaaaggcatcacaccaccgccctgcgcagacaaggatcctcatgtcgttcaatgccaaaccacttgccggcctgaaagtcatcgaactcggcaccctgatcgccggcccgttcgcctcgcgtatctgcgcggagttcggcgccgaggtgatcaaggtcgaatcaccggacggcggcgacccgctgcgaaaatggcgcaagttgtacgagggcacttcgctgtggtggttcgtgcaggcgcgcaacaagcagtcgctgacgctgaacctcaagcacccggacggcctggccatcctcaaacaattgttggcggacgccgacatcttgatcgagaacttccgccccggcgtgctggaaaagctcggcctgagttgggagaccctgcacgcgctgaaccccaagttggtgatggtgcgtctctccggctttggccagaccgggccgatgaaagaccagccagggttcggtgcggtgggtgaatccatgggcggcctgcgctatatcaccggtttcgaagatcgcccgccggtgcgtaccggcatttccatcggcgactcgattgccgcgttgtgggcggtgatcggcgcactgatggcgctgcgtcatcgcgaggtcaacggtggcctgggccaggtggtggatgtggctctgtacgaagccatcttcgccatgatggaaagcatgatcccggagttcgacgtgtttggctttattcgcgagcgcaccggcaacatcatgcccggcatcacgccctcctccatccacaccagcgccgacggcaagcatgtgcagatcggcgccaatggcgatgcgatcttcaagcgcttcatgtcggccattggtcgtgaggacttggccatcgatccggtactggccagcaatgacgggcgcgacagccgccgtgatgaactgtacggcgtgattgatcgctgggtgaactcactgtcgctggatcaggtggtagaaattctgaataaagccgaagtgcccgccagccgcatctacagcgccgaggacatgctcggcgacccgcaattcctcgccagggaaatgttcctcaaggcccagcttcccgacggcaaggaattcaagatgccgggcatcgtgcccaagctgtcggacacgccgggcagttgcgaatgggtggggccgcaactgggtgaacataacagcgtagtgctcggcgggctgggttacgacgctactgccattgtgcgtctgcgcgaggaaggcgcgatctgatggcccgtcgggttactcagttgtgcctcgccgtcatgatggcgagcgcctggcctctgccggccaatgccgaggacacgctgatctggcttttgcgtgatttaccgccactgaccattttcgaaggcccgcgcaaaggccagggtgcgctggaccaactgctgccgaaactgatcgagcatctgccggaataccggcaccaggtactgcacgtcaatcgcgcacggggtacacaaatgcagcgcgagcccacattcacctgcgacccttcattgctgtggaccgccgagcgggccaggtacgtggtgttttccaggcaggcctttgtggtcgccagcaatgggatcacgatccggcgcagccagcagcaagccatggccgactatatttcggaaggccagtttgacctacaggccttgctcgacgcgcataaggcacgggtgggggccactgcggagcgcagctacggtcctgtcatcgatgcacagctcaagcaggccgacacgcactcactcgcgctgcattacggtaacgatgcactgggcagcctgttacaaatgcagcgcctggggcgcttggaggccgtgctgggttactggccggagatccgctaccacgcgatgcagcaaggcatcgcctcggatgacctgagcttctatccgatcaaaggctcggcgccgtatcagcgtacgcacatcggctgctcggatacgccccaggggcgccaggccatcaaacgaatcgaccagatactgcgcgagatcccgctggaacaagtgcagcagtcgtatacctcatggctggacccggtcatgcgcacccattacctgcgggataacccgagttttttccaggactcgccagagccgtgacaaatcgcaggcaaaaagaaaccccaaagcgtggggagacactttggggttaaacgtggcctacaaagaccagtacagcaaggcacaaacaccggagcacaatgtttgctcttgctgttacaaaatctgaccggccacgctgtaggaagtttccacagttaaacaattcttcatgcggcggtggcgttgcgagtctgggctgcgttgcgcaaggctgctatgaccgagggttccagacgtccttcggcaattttgatgtcacgcagcaggcaatccactacatccaccagcacgcgcttgtccatcaattgggcgcggtcgacgtcacgctcgaccacgatggcgccagcaggattcttaacggttaccaggcactcgtcctgcacaccagaggtggtcagcgtaacctgataagggctcagtgcttcttcgagcaataggctgatactttccatctcgatcaccactcaatagttcgggaacaatcgtttcaacgggagctgcatctatcctaagtgactgtttgtgacgtaggaaagttcgctttatcgtctttatggggccgtcagggggtgacggattccagcatgcgcttgcaacatgacaacgaaaaaacggccgcacataagtgcttacgcaatgggcggcttttttgggggttccgggcgttgaggcccaaggtgaatcctatactcggtgggcgctgatcactttgccttgcaggcaggagcgcatgtcaaaaggcccttattgcgaaggataaatacgatgctggaacacgataaagagcaagctgcgctagagaagattcacgccgacatatcacgcatttatgcggagcaacgcaaactcactgccgagacacacaagataacccgtgagaatttctggtatccattgggtgtcgtcatggccatgtttacggcgttcagcactgtcttggctatcgtacagaaactactcacgtagccgcgtataccaagcggggcctgccagaaacgaaaaacgccgctgccccaggaagggaaagcggcgtttttgtctacgcggtgtgccttacaacggcttaccccggttgccatgctggctcacaaacgcctgtacggccttcaggtcattggccaacaccgtgcaacgctcttcacgctcgaacaggtcagccaggtgcaccggcaactccagcgccttgccaacaccggccttctccaccgcttccgggaatttcaccggatgggcggtgcccaggatgaccatcgggatatccaggctgcgacggcagtcgcgggcggccttcacgccgatggcggtgtgcgggtcgagcagctcgccggtctgggcatagacttcagcgatggtttcgcaggtctgcgcgtcgtccacggccagggagtcgaacagcttgcgggtttcggtccagcgctcttcatccacgctgaaaccgccgccgctcttgaaggtgtccatcaagccggcaatcgccgcaccgttgcgaccgtgcatgtcgaacagcaggcgttcgaagttcgacgagaccatgatgtccatggacggcgacagggtcgcgtgcagggtctccttgacgtactggttgccgctcatgaagcggtgcaggatgtcgttgcggttggtggcgacgatcaattggttgatcggcaggcccatgttgcgcgccaggtaaccggcgaagatatcgccgaagttaccggtcggcaccgagaacgacaccgaacgcgccgggccgcccaactgcagcgaggcatgaaagtagtagacgatctgggccatgatccgcgcccagttgatcgaattcaccgccaccaggcgtgtgcccttcaggaagctctggtcagcgaagctgttcttgaccatttcctggcagtcatcgaaattgccttcgatggcgatgttatggatgttctcgccgaagatggtagtcatctggcggcgctgcacttccgacacacgcttgtgcgggtgcaggatgaagatgtcgacgttttcgcagtgcttgcaaccttcgatggccgccgaaccggtatcaccggaggtggcaccgatgatcaccacgcgctcgccgcgcttctgcagcacgtagtccagcagacgccccagcaactgcagggcgaagtccttgaaggccagggtcgggccgtggaacagctccagcacccactcgttaccattcagttggcgcagcggtgcgatggcgttgtgggaaaacacaccgtaggtttcttccagaatctttttaaagtccgcatccggaatgctgccggtgacgaacgggcgcatcacccggaaggccagttcgtggtacggcaggccggcccaggaagcgatctcttcctgggtgaagcgtggcaggttttccggcacgtacaggccgccgtccgtggcaaggcctgccagcaggacgtcttcgaaattcagggccggtgcctggccgcgggtactgatataacgcatgactggctcctctagagcattcttgaacaagggccgccgaacttgcggggctcttgccgcaaaaccattagttcaggtgttcgacgcgaatccgtaccaccgggccgaccacgccttgcagggcttccagggcagcgatggcatcgttgatgtgctgctcgagcacgcggtgggtcagcaggatcatcggcacctggccgttttgctcctcgacttccttctgcatgatcgactcgatgttgataccgcgctccgacaggatgctcgccacttgggccaacacgcccgggtggtcctgggcctggatgcgcaagtaataggcgctttcgcaggcttcgatcggcaggatcgggtgagccgacagcgagtccggctggaacgccaagtgcggcacacggttttccgggtcactggtcatcgcacgcaccacgtccaccaggtcggcgatcaccgacgaagcggttggctccatgccggcacccgcgccgtagaacaacgtggaaccggcggcgtcaccgttgaccatcaccgcgttcatcacgccattgacgttggcgatcaggcggtcggccgggatcagcgtcgggtgcactcgcagttcgataccggccggcgtgctgcgcgccacgcccagatgcttgatgcggtagcccagggcttcggcgtagttcacatcggccgtggtcagcttggtgatgccttctgtgtaggctttgtcgaactgcagcgggataccaaaggcgatggacgccaggatggtcagcttgtgcgcggcgtcgataccttccacgtcgaaggtcgggtcggcttcggcgtaacccagggcctgggcctcggcgagaacgtcttcgaaggtgcggcccttctcgcgcatttcggtgaggatgaagttgccggtaccgttgatgatgccggccacccagttgatgcggttggcggacaggccttcacggatcgccttgatcacagggatgccaccggccactgcggcttcgaatgccacgatcacgcccttctcacgcgccttggcgaagatctcgttgccgtgcacggcgatcagcgccttgttggcagtgaccacgtgcttgccgttctcgatggccttgagcaccagttcgcgggcaacggtgtagccacccaccagttcgatcacgatatcgatttcagggttggtggccacggcgaagacatcgttggtaatcgcaataccggtcgtttcgaactgaggctttggcgaacgcgtggcaatttgcgccacttcaatcccacgccctgcacggcgggaaatttcttcagcgttacgctgaagtacgttgaaggtgccgccaccgacggtccctaacccacagatgcctactttgaccggtttcactgaagaactccccatgaaacggccgacgcgaggtcggccgtggaaaacagccgcacgactgcggctttcaattaacggcctgtcgacttatccacaggccatgatcgtcaaaggttcgacgatgctggtttatttggcactcagcgccagtttcgcaacttgtggtgccggctggtagcccggaatcacctggccgtcagccaaaacgatggccggtgtaccgttgacgccgatggactggcccaacgcgaactgcttggagaccgggttggcgcatttggcggccttgatttccttgccgtcgaccatcttgtccatggccgcttttttgtcggccgagcaccatacggcttgcagctgctcgtcacccggcgaacccaggccctggcgcgggaacgccacgtagcgcacttccacacccagtttgttcagcgcaggcacttcggcgtgcagcttgtggcagtacgggcaggtggtgtcggtaaacacggtgatgtgggtcttggtctcgccgatggctgggtaaaccacggtttcagccaccggaataccattgatcagcttggaaacacccaggcgttcggctttctcggtcaggttgaccggcttgccgtccttcaactggaacaggtagccctggacgatgtactggccatcggcactggcatacagcacgcggctacccttgagcttgacttcgtacaggccggccatcgggctggcgctgatgctctcgatcggggtgtcgagctgcaggttggccaggcttttgcggatggtctgctcggcggcgtcatcggcaaaggcaaaggtggaaaccaacgcaatggctgcggcggcaataatctgggtcaagcgcatgggaactcctgaaggcagatgcagggacgggcagtaacactgcttggaaacacaggtctgggtcgtcccctttgctaaccggcaaagcctaccacagttgggccgcagggcagcccgtggccggataaattggacgttttcagcctcgcgggtggtgcttggcgtgcatatcctgcaaacgcgcgcgggccacgtgggtgtagatctgggtggtggacaaatcgctgtggccgagcagcatctgcaccacacgcaaatccgcaccgtggttgagcaaatgcgtggcgaatgcatggcgcagtgtgtggggcgacagcgccttgccgatcccggcgaccttggcctggtgcttgatgcggtgccagaaggtctggcgagtcatctgctcgccacgcaaactggggaacagcacatcactgggccgtccaccgagcagttcgctgcgggcatcgcgcatatagcgctcgacccacacaatcgcttcctcgcccatcggcaccagccgctccttgctgcctttgcccatcacccgcaacacgccctggcgcagattgacttgctccaaggtcagactgatcagctcggtcacccgcaggccacaggcgtagagcacttcgagcatggcgcggtcgcgctgaccgatggcctcactgaggtcgggggcggcgagcaaggcctccacgtcggcttccgacagggatttgggcaacggtctgccaagttgtggcatatcgacttgcagggtggggtcgagggcgatcagcttttcccgcagcagatagcgataaaaaccacgcacgccggagaggaatctcgcggtggaacgtggtttgtagttctgttccaggcgccaggccaggtggtcgaggatcagctcacggcccgcgttgatcagtgcgaggtttttctcctgcaaccagccgttgaacagcgccagatcgctgcggtaagcctggcgcgtgttgtccgacaggcctttttccagccagagggcgtcgagaaaacggtcgatcagggggtggtcaatggcaggcatagaggctcgaataaaaaagtgggagaggcaggtagcatcctatctcggacctcaaatcgcaggcacaaaaaagcagcccgtaggctgcttttttctgcatcgggaagctggacttaagccagtttttccttgatgcgagctgctttaccggacaggtcacgcaggtagtacagcttggctttacgtacgtcaccgcgacgcttgacggccatgctgtcgatttgcgggctgtaggtctggaaagtacgctctacgccaacaccgttggagattttacgaacagtgaaagcactgttcacaccacggttacgcttggcgattaccacgccttcgaacgcttgcagacgcgaacggtcgccttccttcactttcacctgaacgacaatggtgtcgcccggggcaaaggtagggatctctttggtcatctgctctgcttcgagtgcaaggatgattttgttagtcatgctgtgctcctaaggtaagtcaatggacctaccatcgatacgttgttaactatcgtcccgcgcgaggatgtattcctcgagcagcttcttctcttctccagaaagcgagcggctttccagaagatcggcgcgtcgttcataggtccgaccaagggactgctgtaaacgccaacgccggatgtgtgcgtgattgccacttagcaatacgtcgggaacacgctgatccgcatacacctccggtcgggtgtagtgcgggcaatccagcaaaccatccgtgaaggaatcttcctccgcggagtccgcatgccctaaagctccaggcagcagtcgtgtaaccgcatctatcaggaccatcgctggcagctcgccgccagacaggacatagtccccaatcgaccactcttcatcgacatgagcttcaataaaacgctcgtcaatgccttcatagcgaccggcaatcaggatcagtgcttcctcattcgccagttcgcggaccccagcctgtttcagctgacggccttgaggggacaggtaaatcaccttcgccttctccccggcagcgaccttggcctgaaccaacgcgtcttccaggggcttgatcttcatcaccatgcccgggccaccgccaaatgggcgatcgtccacagtgtgatgtcgatccgtcgtgtagtctcgcggattccaacaggtaagctgcaacagcccctgtttcaccgcccgactggtgatgccgtactcgctgatggcggaaaacatctcgggaaacaaactgatcacttcaatgcgcaaattagccacgcttagaagtccgcgtcccattccaccttcatctcgcccgctgccaggtcgacggccaacacgcattgctcggtatagggcaacaggcgttcgcgatcatccaggctgccagcgcaaggcttgaccaccattacatcattggcgccggtttccagaagatgatcgattttcccgaacagttgcccgagttgatcaataaccttcagaccttccagctggtaccagtagtactcgccgtcggtcaattcagggaacaggttgcgcggcacgcagatctcataaccggccagaagacgagcttcttcacgatcatcaagacccttgagctttgcgaccaggaacttgtcgctcccgcgtccactgaccagctcgacctgtttcacactaccctcgcgcttgagcgtccaggttttgtactgcaacaggttttcagtcggatcagtaaaggaatacaccttcacttcgccgcgaacgccatgaaccgagtaaatcttgccgataacgatcaaatcatcagcaacagctggcgtcgcgttcatattgctcaggctgcggccttagccgagtccttcaacagttttgcaacgcgctcggatggctgtgcacccacgctcagccagtaggctacgcgctcttggttcacggacagacgaacttcttgaccacgagcaacagggttgaagaaaccaacctgttccttgtgcgaaccgtcgcgcgggttgcggctgtcggttacggtcaagtggtaaaacgggcgctttttggagccgccaagggcaagacggattgttagcatgtgaacatcgttcctgtagtcggtgctgcaaatctaaatgcacagcgggcataggtgcccgaaaggccgcatattctaaggaatatccggacttttgcaaatgtctttttctggcgcctatcagcgtgccattcagatctgctatagagccgtcggttaaaacggcgagtcagcgcccgccaacggcgggtttgctggagatcccacatccctgtgggtcggagcaggagctgggctcccgctcgaattctttacatcttgggcatgccaccgccgggcaacataccgcccatgccgcgcatcatcttggccataccgcccttggcggagaatttcttcatcatcttctgcatctgcttgtgttgcttgatcaagcgaccgatgtcctgcacctgggtgccggaacccatggcgatccgacgcttgcgcgaaccgctgatcagctcagggtcgcggcgctcggccggggtcatggagttgatgatggcttccatctgcttgaactgcttctctgccgcgccctgggcattgcccatctgcgccaggttcacaccgccgatgttcggcagcttgtccatcaggccgccgaggccgcccatgttcttcatctgttgcagctggtcgcggaagtcttcgaggtcgaagcccttgcccttcttcagctttttagcaagcttgtcggccttgtctttgtcgagggtagcttcggcctgctcgatcaggctgagcacgtcgcccatgccgaggatgcgcgaggcgatacgctcgggatggaacggttcgagcgcttcgctcttctcgcccataccgatgaacttgatcggcttgccggtgatggcacgtaccgacagcgcggcaccgccacgggcatcgccgtcgaccttggtcaggatcacgccggtcagcggcagtgcgtcgccgaaggccttggcggtgttggccgcgtcctggccggtcatggcgtcgaccacgaacagcgtctcgaccgggttgatcgcggcatgcagcgccttgatctcgcccatcatctcttcgtcgatgtgcaggcgaccggcggtatcgacgatgaccacgtcgatgaacttgagcttggcttctttaatggcagcgttggcgatgtcgactggcttctggctcaggtcggacgggaagaaggtcacgcccacttcgcccgcgagcatttccagctgcttgatagcggccggacggtacacgtcggccgacaccaccatcacggacttcttcttgcgctctttaaggaagcgcgccagcttgccggcggtggtggtcttacccgcaccttgcagacccgccatcaagacgacagccggcggcaccgcactgaggttcaagtcttcgttggccgcgcccatcaggctttcgagttcggcctggacaatcttcacgaacgcctggcccggggtcaggctgcgggacacttcggtgcccaccgcgcgctctttgaccgagttgacgaagtccttcaccaccggcaaggccacgtcggcttccagcaacgccatgcgcacttcacgcagggtgtctttaatattgtcctcggtcagcttggccttgccggtaacgtggcgcagcgtctgcgagagacggtcagtcagattttcaaacatgcgcgatcctttcaggccctattcatagaccgaggtaatggcggcccaggctgtggtaaatcgctattaaaaacagcgctcggcgagcctgcggcgtgggcaggtcgcggattatagcgaagactgcgcccatgcacacccgctgtctggcccgggagtctttcgtgttgcgcgggggtatgccaaactcagcgcctttcgggcttgcctaacaggatttatgctccctttgtcacccagtttgctacccagcctcgccgccgccatcttgtacgccgctgcgaccgtctatcagggcactcgtctggcccagggcaccaaggcggacaaacgcctgttggtaggccttggtgtcctcgccttgctcgcccatgcggccagcctgttcacgcacttgatgacgccggtcggcctggccctggactttttcagcgccgccagcctgatcgcggcggccgtcatcgcgctgaccctgatggcctgttaccggatcccggtcgaaaacctgctggtgctgctcttcccgctgggcatgctgacggtgctgctggcgcaattcgcgcctaccggtacggtgccggtgatcgatgaagagccgggcatcctcgcgcacatcctgctgtcgatcctggcctatggcatgttcaccatcgcggtgttccaggccctgctcctgctgctgcaggaccaccagctcaagcacaagcatccgtccgggctgatcaagaacttcccgccactgcaaaccatggaaagcctgctgttcggtttcctgtgggccggctggaccttgctctcgctgtcgctgatctccggctggctgttcttcgaaaacctgttcgcccagcacctggtgcacaagaccctgctggcctgcctggcctggatcgtgttcagcgtcctgctgtggggccgcaaccgcctcggctggcgcgggcacaaggcgatccgctggaccctggccgggttctgcctgctgatgctggcctatttcggcagcaagctggttcgcgaatacatcctgcatatctgacgggcggcgatcatggacaacttgcccctggagccgatgctcgcggtaatcgccctgctggtgttgtgggccgcgctgttcaccgccatcgaggccgcccagcaacatttgctggccctgcgccccggtacacgccagggcgacaaggcggccacccgcctgagctttccgcgtaacagcctgatcctgtgcaacagcctgtgtcgcgccgccgtggtcatcctgtgcacgctgctggccatatacgcctgggcgcagaacgggccgtggctcggctggctgatctcctgcgcgatcctgctgatactggccgactacctgccccgcgccctggccacccgctatccgcaagcggtactgggcttcggcaatacgctgctgggcgtgccactgaaaatcgtctaccccctggcctggctgctcaatggtattagtctgttgctgcttcgcccgttcgcgcgcaagaccggcgtggtgaagaagagcgacgaaccgctgcctgaccatgatgacgaacccgagcccgagatcgccgaaggccgtacccccggcatgccgggcatccatgctctggacaacatcaccgtcaacgacatcctggtgccccgcagcgaagtggacggcatcaacctggatgactcgatcgaggagatcatcgagcagctacgcacctcccagcgcacgcgcctgccggtgttccacagtgatatcaaccaggtcgaagccgtgctcaacacgcggcagatccagcacctgttgcccgacgcgagcctgaccaaagaggcgttgctcgcagcctgccacgagccttacttcgtcccggaaagcactccgctgcaactgcaactgctgaatttccacaaacagcagcgccgcctgggcatggtggtggatgaatacggcgaagtactcggcatcgtgaccctggaagatatcctcgaagaaatcgtcggtgaattcgaaagcgaacagagtgcggacaacccgcatatcgaagcgcaaccggatggccgctacatcatcgacggcgccgcctcgatccgcgaattgaacaagagcctgaactggcacctgcccagcgacggccccaagacgctcaacggcctggtcaccgaagcgctggagaccattccggattgcgcggtgtgcctgaaaataggccgctaccgcctggaaatcctcgagaccgaggacaaccgggtgagcaaggtgctgatctggcataccagccggatgccggtcgccgcttaattcgtaatcaaataatgtgggagggggcttgcccccgatggccgagtgtcagtcaccgcatcaagtggctatacacagctatcgggggcaagccccctcccacattttgacttgttgtatgttcaaaccccttcctataatcgggacggcttaccagagccctgcccgaccgcgtgctacccgcactgaacgcgtccaggcaccgttaaaccgcgtctgaccggtgttcgctcccatcccgagccgccccgcgcgctaccctgatccatgggagttcgaccaataataatccgcgtccaaacgcgcaatgaccgtcagggataccaccatgagcaccacctacaacgaggccgcgcccgccgctgccccgaccaactcgaccgcacgtgtcgccacggcgagcatcgtcggcaccgccatcgagttctacgatttctatatctacgccacggccgctgcgctggtgatcggcccggtgttcttcccgcagacttccggcaccgcgcagatgctggcgtcgttcctgaccttcggtatcgccttcatcgcccgcccactggggtcggcgctgttcggtcactttggcgaccgtatcgggcgcaaatcgaccctggtggcctcgctgctgctgatgggcgtgtgcaccacgctgatcggtttgttgcccggttatgacagcatcggggcgtgggcgccgatcctgttgtgcgtactgcgtttcggccagggcctgggcctgggcggtgaatggggcggcgcagcgctgctggcgaccgagaacgcgcccaagggcaaacgcgcctggttcggcatgttcccgcagctcggcccttcgatcgggttcctggcagccaacggcttgttcctgatcctggccatgagcctcagcgatgagcaattccgcagctggggctggcgcattccgttcatcctcagcgcggcgctggtgatggtgggcctgtacgcacgattgaagctgcacgagacgccggtgttcgccaacgccgtcgccaagcaagcgccggtcaaagtgccgttggtggaactgttcagccagcattggctgccggtgttgctgggcgctgcgtcaatggtggtgtgctatgcgttgttttacatcactactgcgttttccctgagttatggcgtttcaaccctgggctacagccgcgaaaccttcctcggcctgctgtgctttgcggtgctgttcatggggctggcgacgccattggcagcgttggccagtgatcgttacggacgcaaaccggtgctgatcgtcggcgcgatcctggcgattctgtcgggctttaccatggagccattgctcacccacggttcgacctgggcggtggcgctgttcctggcgctggagctgttcctgatgggcgtaacgttcgccccgatgggcgcgctgttgccggaactgttcccgacacgcgtgcgttataccggcgcttcggcggcgtataacctggggggaattgtgggggcatccgccgcaccgttcttcgcgaccaaactggtggcgatgggtgggctgagttatgtcggtgggtatgtgtcggcggcggcgttgctcagcttgattgctgtgctgtgcctgaaagagacgcgggataatgatttgaatcgcgtgggctgatagaccgctatcgggggcaagccccctcccacatttgaatgtattcacaaatctaactctgtgaactggatcaagtgtgggaggggggcttgcccccgatgcttttagagctctaccaccacagcctgggaagcacgggtcgccttggcccgggccgcttcaatcgactcatcccgcgccaacgccacgcccatgcggcgctggccattcacctcgggcttgccgaacaggcgcagcgcagtatcaggttcgctcaacgcggcgcccaggttggcgaacgccgtctgggtcgactgcccttccaccaggatcaccgccgaggccgaagggccgaactgacggatcaacgggatcggcaggcccaggatcgcacgagcatgcagtgcgaactgcgacaggtcctgggaaatcagggtcaccaaaccggtgtcatgcgggcgtggcgacacttcgctgaaccacacctgatcacccttgatgaacaactccacgccaaacaggccgcggccacccagggcctcggtaaccgccttggcaacgcgctcggattcggccagggcaatcgggctcatggcctgtggctgccaggattcctggtagtcgcccttctcctgacggtggccgactggcgcgcagaaggtggtgccgccgatgtggcgcacggtcagcagggtgatttcgtagtcgaagtcgataaagccttcgatgatcacacggcctttacctgcacggccgccttcctgggcgtagtcccaggctttctgcacgtcatcgacgctgcgcagcaggctctggcccttgcccgacgaactcatcaccggcttgaccacgcacgggaagcccaggtcctgcacagccttgctgtagtcttcgaaggtatcggcgaagtggtacggcgaggtcggcaggtccagctcttcggcggccaggcggcggatgccttcgcggttcatggtcagcgaggtggcgcgcgcggtcgggattacggtgaagccttcggcttccaattccaccagggtggcggtggcgatggcttcgatttccggcacgataaagtgcggtttttccgcctcaatcaccgcacgcagcgcggcgccgtcgagcatgttgatcacgtggctacggtgcgcaacctgcatggccggcgcgttggcgtagcgatccacggcaatcacttcaacgcccaggcgctgcagttcgattaccacttccttgcccagctcaccgcagccacacagcaaaacgcgggtcgcggttggcgacaatggagttccgattcgggtcatctcaggtcctcaggggagcggatcattgggagaaaggccggcattttacatgaactgcaggaattggcctcagttggcgacggcccgcttgcggatacgccaggccatgatcagccacaccaccgtgaccccagcgaacttcgacaccagcgcagttcccgccaccgccggggtaagcgcgccgatcaggccgaagaagataaaggtgtcgaggggaatgctcagcgccgaactgatccacaggcggtcgtgcagcggacgcttggtgatgctgaacaccagccagtcgatacactcggacactgcgaaggccgtggcgctggcgagggcgatggccgggtcggacgtgacgtacgacagcaccagcgcggccagcatggcgatgattgcgccatggccgaagcgggtttgcaccatgtcgcgcaggataaagaccaggccaccccaggcggaccagatgacatccaggtgcggggcggtggagaaggcgaagttgatcagcacgacgctgctgatgtaggcgatcaggaagagcatgggagtggacctgtgaacaaggggcacagggtacttcacattttgaaatatgtcgtctgggtggaccctatcgggggcaagccccctcccacagttgaccgaggtgtcatggccggcgccgaacaatgtgggagggggcttgcccccgatagcggcggttcagacaccggatttgccaggcatcatccacaccaacccactcgccagcgcccgctcatgacataaccccagcaccacccggcgctcggcgttatccatgcggctccaacgcgtaatctcttccaccgtacgctggcagcccgtgcagatatcgtcatcgtccagcgcgcaaatactcacgcaaggcgacgcaacaggacgttcaatcgggttcattcttcctgctcgaccaggtcccgcgcataacgctgcgagttatgcacatagtgcgcggcgctggcttcgagcatgcgtttctgcgcgtcggtcagttcacgcaccaccttgcccggcgagcccattaccagcgaaccatcgggaatttccttgccttcaccgatcagcgaattggcgccgatgatgcagtgcttgccgatcttggcgccgttgaggatcaccgcattgatgccgatcaggctgtaatcgtccaccgtgcaaccgtgcaacatggcgttatggccgatggtcacgccggtgcccagcgtcagcgggtagcccatgtcggtgtgcatcacgctgccgtcctgcacgttactgttcttgccgatcaggatcagttcgttgtcgccacgcaacaccgcgttgaaccacacgttggcgccctcctccagcttgaccttgcccaccagggtggcattcggcgctacccagctgtgtggatgagtctcgacgcgggcgtcgcccaggcggtatttcatggtttttcctcacggcgttgccattcaaacgatggcttagatattgatgaaactcttgggcggttgatgcaggctgatcttggcgtcgtcatagagcagattgatcagctcgacgatcatgatcgccgtcagcccccagatcttgtattcgccaaaccgatagctgggcacgtaccaactgcggccctggtaatcgatccggtgggtatgttcgcgtgggtcctgtcggaagaagtccaagggcacgctgaaaaccgcggcaatctccgcatcgttggccaggtattcgacgtaatcagggatcacgccgacatacggcgtgacccgaatgccatgcagggagatcaaggggctcagcgggccgatgacttcgaccaggccgggtggcaggccgatctcttcttccgcttcacgtagcgcggtgaagatcaggtccgggtcttcggggtcgcggcgtccaccgggaaaggccacttcgccaccatgggtcgacaggccgctggcgcgcagggtcaggatcagctcaggttcgtcactgcgggtaatcggcaccagcaccgcggcctcggggaaacgcccgtcggcttcaagcaggtggggggtgtggttgcttacccgtcgaagtagctcgtccagcatgagtcatctcggtctgttggctaccttgcatcatgcaccaaagcgtacgggcgcccaaccccaaaacccgcccggtgtcgctaaacgacaacttgcagcgccctgcccgtcacgccaagatagacgcactttccaggaaccccagcatgaatttctgcagccagtgtggcaaaccggttacccaacgcatccccgaaggcgatggccgcctgcgctttgtgtgtgatcactgctcgaccatccactaccagaaccccaatatcgttgctggcacggtgccggtgtggggcgacaaagtgctgctgtgccgccgcgccatcgagccgcgcctgggttactggaccctgcccgccggtttcatggagaacggcgagacggtcgaacaggcagccgctcgcgaaaccctggaagaagcctgcgcccgcgtgcacaacctgagcatctacacgctgatcgacgtgccgcatatcaaccaggtgcatatcttctaccgtgccgacctggtggacctggactacgccgcaggccccgaaagccttgaagtgcagctattcgacgaagccgacatcccttggtccgagctggcgttccgcacggtcgggcgtaccctcgaatactatttcgctgaccgtcggcagcaggccttcccggtgcgcagcgaggccgtagagccgcgggtgttgcccgctccatgaccagggataccgttttaatgcgttggctgcttgcgcttatctgcctgtcgttcgcgaccctgtcatcagcctcgaccgtggaaaccctgggcggcaagaccgtcgaaaaggtcctggtgctcaagtccgcccatcagttgcagttgatcaacgacggcaagccgctcaagacctaccgcatttccctgggcaagaaccccaagggccacaagctgatcgagggtgaccgccgcacgccagaggggctctactggatcgactggcgcaagaccagcgaccgcttcaacctggccatgcacatctcctacccgaatatcagcgacgccgcccgcgcccgccgcgaaggcgtgaaacccggcagcatgatcatgatccacggcacccccgataccgaggaatacccggagcagtggttccacaccctggactggaccgacggctgcatcggcatgcgcaacgtggatatgcgtgaagtctggaacctggtcaaggacggcacactgatcgagattcgtccgtaatctcgtaccgttcgtaaaataattcaaaaaaaattcccatcccagcctgcgcccgccggtgaataccagttcatccccgcgggctgcgccgttctgcgcgcgataaagacctctctaataccacttgataccaggccccattgcagggcccttaaatcagtgaacgcactgttttcgctgcattgacatggtatttaagtggtattaatttccggccaataccgggcgacaacactccaataaccgcatcggaaacctgacagatgaatcccatcctggccctgcgccccgacgacaaacaatccacgccgctgtacctgcaattggcgcgcaaactggaagcagcgatccatgccggccagtggacgtccgaacaagccctgccatcggaacgcgtactcagcgagcaactgagcatttcgcgagtcaccgctcgcaaggcgctggaagtgttgtttgcccaagggctgatccgccgcaaccaaggctccggcacttacatttcgccacgcctggagcagccgctgtcgcgcctgtcggggttcagcgagatgctgcgactcaagggttttgtgcccagctcccaatggctggagcgtgaactgacccagccgacccacgaagagatgatccgcctgggcctgtcgcccgccgacaaagtggcacgcctcaagcgcttgcgtaaggcggacgacacggtgatggcgattgaaatgagcaccctgcccgccttggtgctgccgcagccccaagccatcggtcattcgctgtacgaatacctggaaggcatcggcaaaccggtggtgcgtgccctgcagcatatccaggcgatcaacgcctccgacgagttcgccaagctggtcggcatcgcccccggtaccgccatgctgctgatgacccgggtcggctacaccgccgacaacacgccgattgaaatcaccgacacctactgccgcaacgactactacgacttcgtcgcagagctgcgccgccatgactattccgctgaactgcgaatttagagaactgcccatgtccgaagacaacatcctcacgcccaacggctggattcgcggccgcctggtgcacgagcacggcaaggtggtcgccatcgaaggcgacccctgcgacccggctgacaacgaccggccctacctgctgccaggttttatcgacctgcacgtccacggcggcggtggcaaggacatcatggaaggcagcgatgccttcgagaccatcacccgcacccacgtgcgtttcggtacgacttctctgctggctacgaccatgactgcgccggtggatgaaatctcaagcgtactcggccagctcggcaccttctgcgaacggcgtccgacgggcagcgcccgcgtactgggtgtgcacctggaagggccttacatcaatccgggaaaactcggcgcccaacccaactttgcccacaccgcattgatggccgaagtggaagcctacctgcgcctggcgccgatccgtgtaatcaccatcgccccggaaatcgccggccacgatgccctgatccgcgccctcagtgaacgcggcgtgcgcatgcagatcggccataccctgggcagctatgaagaaggcgtcgccgccctcgctgccggcgccaccagcttcacccatttgtacaacgccatgagcccgctgcatcaccgcgagcccggcatcgtcggcgccgcactggcccacgccaagtacgccgaattgatcccggatttgctgcatgtgcaccccggcgccatgcgcgtggctttgcgctcgatcccgtgcctgtactgcgtcaccgactccaccgccgccgccggcatgcccgatggtgaatacaagctgggcagccacaccgtgaccaaatgcctgggcggcgtacgcctggccgacggcaccctggccggcagcacgctgaccatggaccaggcgctgcgcaacctggtgaagatcggcctgcccatcagcgaagcctcacaacgcctgtcgcaatttcctgcggactacctgggcctggaagaacgcggtcgcctgcaacccggcagtttcgccgactgcgtgcgcctggaccgcaccctgacactcaccgacgtaatggtcgaaggagaaaccattgacttcaaaaatgcttgaagaggccctggcctcctgcgacgccgtgtcggcgcaattgcaacgcctggacccactgctggaagaagtcgccggccgcctgcgccgccagccgccgcaagtggcgatgaccatcgcccgcggcagctcggatcacgccgccagctacttcgcctacctggccatgcagcacgtgggcatcccggtggcgtcgttgccaatgtcggtggtgaccctgctgcaagccccgttgaaagtcagcggccaagtggcgttcggtttctcgcagtcggggcaaagcccggacctggtcaacagcttgcgcctgctgcgcaaacgcggcgccctgagcatttcgctggtcaacgctgaagactcaccgctggaagccgcctgcgaattccacgtgccgctctgcgccgggccggagcaaagcgtcgccgccaccaaaagttttatcgccacactgagtgccagcgcgctgctgattggccactggaaccaggaagccgacttgctgcaagcctgccgcgccttgccggacgaactgcgtgccgccgccaggcaggactggacggtcgccatcgacgccctgcgcgactgccagcaactgatggtgatcggtcgaggcgccggttttgccatcgctcaggaagcggcgctcaagctcaaggaaacctcggcgatccaggccgaagccttcagcagcgccgaggtacgtcacgggccgatggcactgattggcgacaactaccccctgctggtgttcgccccgcgcggcgccgagcaagccggcctgttgagcctggccgccgacatgcgtcaacgcggtgcccgcgtgttgctggctgcgccggacgatatcgccgagcgtgacctgaccctgagccgcgccgaacatccgaccctggacccgatcctggcgatccagagtttctacgtgatggcggcaggtttggccgaagcccggggcatggacccggaccagccgcgtcacctgagcaaagttacccgcactcactgagtggcgttttcctgatgagtaccgtgcccatgtccaacaacaataatgacctgaccctcagcgcccccctcagcggaccggtgctggccctgggcaacgttcccgacgaagtgttcgccagcggcgccatgggcgagggcattgccatcgacccgttgaatgactgcctgcatgcaccctgtgacggcgtgatcatccacgtcgcccgcaccgggcatgcgctgacgatccgcgctgacaacggtgccgaaattttgatgcatgtgggcatcgatacggtggaactgaacggcgaaggcttcgccttgctggtgaaggatggcgcgcgggtaagcaagggccaggcgctggtgcagtttgatctggaccgcattgcacgccagtgcaagagcctggtcagcctgatcatcctgaccaatggcgagcgcttcgagttgcgctcggtggcggctagaacggtcaaggtcggcgagccgttgttgcagatcgtggcgcgttcggcgacgtcggtatcgacgcctgtggataactcggcgggtgaagccagcgcccgcgtacgcatcacccatcgcggtggtttacatgcccgcccggcggcgttggtgcgcaaggctgcgcagggtttcagcagccaggcctcgctgcactttggcaataaaaccgcctcgtgtgacagcctgatcggtttgctgggcctgggtatcggtgaaggggatgaggtgcgtgtgagctgtcgcggcaaggatgccgaagcggcggtgcaggcagtgatcgcggccttgtcagccgtcgtcaaggaagaacaccacaccccggtggccgccgcgccccgtcgggtcaataccgaagtgggtgtgttgcaaggcgtgtgtgccgcgccgggcctggtctgcgggccattgttccgcctgaccggtatcgaactgccggcagacaccggcaagcatgctgccgacgagcaactgcaacgcctggacgccgccctggagcaggtgcgcagcgaaatccgcagcaccctggatcatgcgcgccagcgcaggaacgttgaagaagaagacatcttcgccgcccacctcgccctgctggaagacccgaccctgctggacgccgccaccggcgccatcgagcagggcagcgccgccactcatgcctggcgcgacgcgatccaggcgcaatgcgccgtgttactggccctgggcaaaccgctgtttgccgaacgcgccaatgatctacgggatttgcagcaacgggtactgcgcgcattgctgggtgaagcctggcacttcgaattgcccgcaggggcgattgtcagcgcccacgaactgaccccatccgacctgctgcaactgagcgcgcaaaatgccgcaggcatctgcatggccgaaggcggtgccacctcccatgtggctattttggcccgtggtaaaggcctgccctgtgtggtcgcgctgggcgccgaagtcctcgatgtgccccagggccaacgcgtggtcctcgacgccgccaacggcaggctggaactggcgcccagcgatgcgcgccacgccgaagtacaccagattcgcgatgcgcagaaactgcggcgccagcaacaacaggcccaggcccgacagccggcacgcaccgccgatggcgtgagcatcgaagttgccgcgaatgttgcctccagcgccgaagccttggtggcgtttgaaaatggcgccgatggcgtcggcctgctgcgtaccgagtttctcttcgtcgaccgccgcaccgcgccggacgaacaggaacaacgccaggcctaccaggccgtgctggatgccatgggcgacaagtcggtgatcatccgcaccatcgacgtgggcggcgacaagcaactcgactacctgccgctgccggtcgaggccaacccggtgctgggcctgcgcggtatccgcatggcccaggtacgcccggaactgctcgaccagcaactgcgggcgctgctgcaagtcagcccgctggaacgctgccgcatcctgctgccgatggtcagcgaggtggatgagttgttgcagattcgccagcgcctggacgagttgtgcgccgagttggaactgacccagcgccccgaactgggcgtgatgatcgaagtgcccgccgccgcgctgatggccgagcatttggccaaacatgccgacttcctgtccatcggcaccaatgacctgtcccagtacaccctggccatggaccgcgaccacgccggcctcgccgcgcgcgtcgatgcgctgcacccagcgctgctgcggctgatcgcccagacctgcgcaggcgcggcgaaacacgggcgctgggttggggtctgcggcgccctcgcctccgacccgctggccacgccggtactggtcggcctgggggtcagcgagctgtcggtgagcccgccgcagatcggagaaatcaaggatcgcgtccgccacctggacgcggcgcaatgccggcaactgagccagggcctgctcgacctgagcagcgcccaggccgttcgccaagcctgtcaacaccactggccgctgagctgacaacaacaagaaaaaaggagactcgccatgtaccaacatttcatcgaaggcctgcaacgcctgggtcgtgcactgatgctaccgatcgcgatcttgccgatcgccggcctgttgctgcgcctgggcgacaccgatcttttgaacatcgcggtgatgcacgacgccgggcaggcgatcttcgccaacctggcgctgatctttgccatcggcatcgccgtgggttttgcccgcgacaacaacggcacggccggtttggcgggtgcgattggctacttggtgatggtttccacgctcaaggtgatggacacgtccatcaacatgggcatgctcgccggtatcgccagtggtttgatggcaggcgggctgtataaccgcttcaaggacatcaagctgccggagtacctggcgttctttggtgggcgacggtttgtgccgattgtcaccgggttttcggcggttgcgctgggtgtgatctttggcctgatctggccgccgatccagcacggcatcaacagcttcggcgtgttgctgatggagagcggcagcctcggcgccttcgtgtttggcgtgttcaaccgcctgctgatcgtcactggcctgcaccatatcctcaacaacatggcgtggttcgtgtttggcaccttcaccgacccggtgaccggtgccgtggtgaccggtgacctgacccgttactttgctggtgaccccaaaggtggccagttcatgaccggcatgttcccggtgatgctgttcgggctgccagcagcgtgtctggcgatgtaccgcaatgcgttgccggaacggcgcaaagtgatgggcgggattttcctgtcgatggcgctgacgtcgtttctgaccggggtgaccgagccgattgaattcgccttcatgttcctcgcgccgtttttgtacctgatccatgcggtgctgaccggcctgtcgatggcggtcaccaatatgctgaatatccacctgggctttaccttctccggtgggtttatcgacatggtgctgggctggggcaagtccaccaatggctggctggtgttcccggtaggcctggcgtatgcgctgatctactacagcgtgttcaactactgcattcgcaagttcaacctgaagacgccggggcgggaagatatccaggtggtgcaggctgaggtgatgacggataaccagcgcgccagtgcctatattcgtgcgctcgggggtgcggcgaacctgctgagcgtgggtgcgtgcactacccgtctgcgcctggacatggttgatcgcaaccaagcggtggatgcggagctgaaagcactgggcgccatggccgtggttcggccgggtaacggcgggagtttgcaggtggtggttgggccgatggcggatagcattgctgatgaaatccggctggccatgccttcgtttgttgccagcgcgccggtgaaggtttcccctgtggataagccggtggcggtgaatgtgcaggaggccgagaagtggctgagtgcgttgggtggccaagcgaatgtgcggcagttggaagcggtggcgatgacccgcttgcgcgtggagttgggagatgattcggggctgtctgaagctcagctcactgcgctcggttgccaaggtatgagtcagcttgagagcggtgtttggcacctgttgattggtgacaaggcttccgggttgggtgaggcgttggagcggttggtcagtggtcgagaggtcggcgccagggtttagagatgcagtggctgttctcgcctcatcgggggcaagccccctcccacagttgaccgcattgccaaggtgggagggggcttgcccccgatgaggccctgacagacaacaaaaaacccgctgaccaaactggcccagcgggtttcttgtttttgcagcatgcgaatcaaaagtccgccaactgccacacctcataggccggtgtctcatacgggtggctgagtttcaaagcagccacaacagccacaatcaactcatccgccaccaccaactccaccttccactcttcaaccccttcaacctggcccacctgtccgatgaacggctggctgccgtccaacgcgcggaattggccctggcccagcacttgccaggcgcagctgtcgtagttgccgatgcgcccgccgccggcggcaaagacggcgatcttcaccgtctccacatggctgtcgggcacaaagaaggcgagcttgtacaccgtcttagttcacccacacgcgggcgttacggaacatgcgcatccaggcgccgtcttcgttccactcttccgggcgccacgagttttgcacggcgcggaatacacgctccgggtgcggcatcatgatggtcacgcgaccgtcgcggctggtgaggccggtgatcccgcgcggcgagccgttcgggttggccgggtaggtctcggtgaccttgccatggttgtcgacgaaacgcatggccacgcaaccggacaggtcggcttccaataaagcttcttcgctggaaaactcagcgtgaccttcaccgtgggcgatggcgattggcatgcgcgaaccggccatgccttgcaggaagatcgagttggactcctgcacctgcaccatggcgacacgggcttcgaactgctcggaacggttgcgcacgaagtgcggccagaactcgctgcccgggatcagctcgctgaggttggacatcatctggcaaccgttgcacacacccagggtgaagctgtcgttgcgctcgaagaaaccctggaacgcatcacgcgcacggctgttgaacagggccgatttggcccagccttcaccggcacccagcacgtcgccgtaggagaaaccgccgcaggccaccaggcctttgaactcgttgaggtcaacgcgaccggcgaggatgtcgctcatgtgcacgtcgatcgcattgaagccggcacggtcgaacgcggccgccatttccacctggccgttgacgccctgctcacgcagtacggcaacctgtgggcgaatgcctttcttgatgtaaggcgcggcgatgtcctggttgacgtcgaagctgagcttggtgctcaggcccgggttgtcttcttccaggatcacgtcgaattcctgctcggcgcaatcggcgttgtcacgcaggcgttggatctggtagctggtctcggcccactggcgttgcagcaagcggcgctgaccggcaaaaacagtatcgccgttgaaggagatgttgatctcgccgttgttgatcggctggccgatcaccgccacgcagtcgtccaggccggcggcgctgaactgtgcaagtacgtccggggtagcgtcctggcgcacctggatcaccgcgcccaactcttcgttgaacaggatgccgttgatctcggccgcatcctcggcaacgctgtcgagcacgatgttcaggccgcaatgaccggcgaaggccatttcgacgacgctggtcagcagaccaccatcggaacggtcgtggtaagccagcaggtggccgtcggcattgaggccctggatcacggcgaagaacgccttgaggtcttcggcgtcatcgacgtccggtgcctgtttgccgagcttgccatgggtctgcgccaggatcgaagcgcccatgcggttctggccacggcccaggtcgatcaggatcaggtcggtggtgcccttgtccatgcgcagttgcggggtcagggtctggcggatgtcggtgaccggtgcaaaaccggtgacgatcagcgacagcggcgaggtgactgtcttgtcgacgccgtcttcgttccaacgggtggccatggacatggagtccttgcccaccggaatggtgatacccagctcagggcacagctccatgccgaccgccttgacggtgtcgtacaggcgcgcatcttcacccgggtggccggctgcggacatccagttggccgacaacttgatgtcggacagcttaccgatgcgcgatgcggcgatgttggtgagggtttcaccaatggccatgcggcccgacgccggagcgtcgagcagggccagcggggtacgctcgcccatggccatggcttcaccggtgtagacgtcgaagctggtagcggtgacggcaacgtcggccaccggaacctgccacgggccgaccatttggtcacgggccaccaggccggtgatggtacggtcgccgatggtgatcaggaagctcttgctcgccacggccgggtggtgcagcacgcgttcgatgctgtcggccagttccagcgtgcttgggtcgaaatcatcgcccagctcggcttcacgcacagcggaacggtgcatgcgcggggctttgcccagcagcacttcgagcggcatgtccaccgggctgttgccgaagtggctgtcggtgaccgtcagttgcggctcggcagtggcttcgccgaccacggcgaacgggcagcgctcacgctcgcagatggcttggaagcgcgcgaagtcttctgcgccaaccgccagcacgtagcgttcctgggattcgttgctccagatttcgtgcggggccatgcccggctcgtcgtttggaatattgcgcaattcgaagcggccaccgcggtcgccatcgttgaccagttccgggaaggcgttggacaaaccgcccgcgccgacgtcatggatgaagctgatcgggttcttgtcacccaactgccagcaacggtcgatgacttcctggcagcgacgctccatttctgggttttcgcgctgtaccgaagcgaagtccaggtctgccgagctggtgccggtggccatggaggaagcggcgccgccgccgaggccgatcagcattgccgggccgccgagcacgatcagcttggagccgaccaggatctcgcctttcttgacgtgttcttcacggatgttgcccatgccgccggccaacatgatcggcttgtggtaaccgcgcacttcatcgccacgcggggtggtgatggactgctcgaacgtacggaagtaaccggtcagggccggacgcccgaattcgttgttgaacgcagcgccgcccagtgggccttcgatcatgatgtcgagcgcggtgacgatgcgctcaggcttgccgtacggcacttcccacggctgttcgaagcccgggatctgcaggttggagacggtgaaaccggtcaggcccgccttgggcttggcgccacggccggtggcgccttcgtcgcggatttcgccgccggaaccggtggctgcgcccgggaacggggcaatcgcagtcgggtggttgtgggtctcgaccttcatcaggatgtgcaccggctcctgcaccgcgccgtactggcgggtctcagggtccgggaagaaacggccggcgacggagccgacgatcaccgaggcgttgtccttataagcagaaagaacaccttcgctgtgcatcacgtaggtgttcttgatcatgccgaacaggcttttttcctggctttcgccgtcgatgtcccaactggcgttgaagatcttgtgacggcagtgctcggagttggcctgggcaaacatcatcagttcgatgtcgtgcgggttgcgcttcaagccgttgaaggcattgaccaggtagtcgatctcgtcttcggccagggccaggcccagttcggtgttggccttctcgagggcggcacggccaccaccgatcacgtcaatcgcggtcagcggcttgggctcggcgtggctgaacaggccggcagcctgttccagctggctgacgatgatctgggtcatgcggtcatgcaggctgctggcgatcagctcggcctcggcatcgctgaactggccggcgacatagaaagcgataccacgctccaggcgctggattttctccaggccgcagttgcgggcgatatcgctggccttgctcgaccaaggcgagatggtgccgaaccgtggcagaaccaggaacaagcggccagtcggctcttgaacgggaacgcttgggccgtacttcagaaggcgtgcgagcacttgctgttcgtcggcggtcaatacgccggtaacgtcggcgaagtgagcaaattcagcgtacaggcctgtaacagctggaaccttctggctcagttgctcaaggagtttgctgtggcgaaaggcagaaagggcaggagcgccgcgcaggatcaacatcttcgggacagcctcgggaagggggtgtgctttgaggccgtgcattctagcgtaaaccgccgccaacggcacccgaaacgctaccggtggctgccgccgaacgtcagttggccggattacacccctttcgcggggtcatagggggcattcggcgcagttattttaaccgtcacaatccctcgccaagccgcgtttctgcgggttgcagcacagttttgccagcgctagcagacaacgcccatgctgtcgagatatggcgccgtgggccgtttgcgtatactgcgcagatgttctccccaacggctttgcgaccgcgatgcgccaaatggctcatcgccaccggactcttcctgatgctcagcgcctgtgttgataaacccagcacgctcgagcgaatcaaggaggatggcgtattgcgggtgatcacccggaacagcccggcgacttatttccaggaccgcaacggcgaaaccggtttcgagtacgaactggtcaagcgcttcgccgacgacctgggcgtgaagctggagatcgagaccgccgacaacctcgacgacctgttcggccagttgggcaaacccaacggcccggtcctcgccgccgccggcctggtcagcagcgaacagcgcaaggcgcaggtgcgtttctcccacccttacctggaagtcaccccgcagatcatctaccgcaacggccagtcccgcccgacgaacgcggcagacctggtgggcaagaagatcatggtgctcaagggcagcacccacgccgaacaattggcggcgcttaaaaagcagaatcctgcgattgaatacgaagaatccgacgccgttgaggtggtcgacctgctgcgcatggtggacgaggggcaaatcgacctgaccctggtggactccaacgaagtggcgatgaaccaggtgtacttccccaacgtgcgcgtggcgttcgacctcggcgatgccagcaaccagagctgggccgtggcgccgggtgaagacaacagcctgctcaacgagatcaacagctacctggataaagtcgaaaagaacggcacgttgcagcgcctgaaagaccgctactacgggcacgttgatgtgctcggttatgtgggtgcctacaccttcgcccagcatctgcagcagcgtttgcccaagtacgagaaacacttccgcgcctatgccaaggaagaaaaggtcgattggcgcctgttggccgccatcggctatcaggaatcgctgtggcagccggccgtcacctccaagaccggcgtgcgcggcctgatgatgctgacccagaacaccgcccaggccatgggcgtgtccaaccgcctggatcccaagcaaagcatcatgggcggcgccaagtacctggccaagatcaaggatgaactggacgacagcatcgccgagccggatcgcacctggttcgccctcgccgcctacaacgtcggcaccggtcacctggaggatgcgcgcacgctggccaagcgcgagggcctgaacccgaacaagtggctggatgtgaaaaagatgctgccgcgcctgtcgcagaagcagtggtacagcaagacccgctacgggtatgcgcgaggcggtgagccggtgcactttgtggcgaacatccggcgttactacgacatcctcacctgggtgacccagccgcagctggagggcaaccaggtggtcgaaggcaacttgcatgtgccgggtatcgacaagaccaagccgccggaagataaccctcaattgtaagaacaccacaaaacccggtgggagggggcttgcccccgatagcggtgtgtcagttactactaagctggcagatacattgcaatcgggggcaagccccctcccacattgggatctctaccgggcttagaggccggtaagcaggtggaccactccgcctgcgagcatcatcactgccggtactcccgccgccttcaacgccacctcatccaaccgccccacatcctgcaactgcaccctcacccgcgtcaacgccacacgctgctgcgacttgaggttgtccgcgccgcccagcgcgctgattacttcggccggcaatagactctgcgtcggtgttgctacggtctcggcaatcaaatccggcgtcagggccttccagaacgcccgctgcaatttctcgaacatgctcaaagctccatgacaggtgaggtttcaacggtagctgcgtgatattggcgcagggcctcacgcacttgggcggcttcttccaggcccaacacttggcgggcgatgatctggcagtcggccaggtccagttcgcgcacggtggccttgatggtggggatcaacggcacgctgactgacaactcgtccacgcccagcccgatcagcaccggcgcggccagcgcttcggaggccagcgcaccgcacacccctacccacttgccatgggcatgggcggccttgacggtggtggcgatcaggcgcagcaccgccgggtggaagctgtcggcctggctggccaggcgcgggtggtcgcggtccatggccagggtgtattgggtcaggtcgttggtgccgatggagaagaaatccacgtggggcgcgaacacatccgccatcagcgcggcggacggtacttcaatcatgatgcccagcttcggcagctcggtaagccccagcgccagcgcttcctcttccagaatcttgcgcgccaggtgcagctccgacagcaggctgaccatcggcaacatgatgtgcaggcgcgcaaaaccggcgctggcaaggatcgcgcggaactgttcgcgcagcagctcaggacgttccaggcacaggcggatgccgcgcaggccgaggaacgggttggtttcggcatccatcggcacataggccaacggcttgtcaccacccacgtccagggtgcgcaccaccaggttgcgctcggtgcccagggcacgggcgatggcggtgtaggtggctgcttgttcatcggggcctggcgcacggttgcggtccaggtagagaaattctgaacgcagcaggccgacgccttcaccgccgagggtcagggattgctcaacttcctgcaaggaggccacgttggcggtgacttcaacgtgatggccgtcgcgggtggtggcgggcaacgacgcctgcgccacatcgcgctgatggcgcagcacctgttgcttgcgggcagtttccaactgctcgatttcggccaggttcggctccaggtgcagctcacctttgtcggcgtcgagcagcacctgtttgccattggccagccccagaacctcggctgaaacaccgcaaatggccggcaggccaagggcacgggccaggatcgcgacgtggctggtcgcgccaccgccgacagtgacgaaccccagcactttgcgggtatccaggctcgccgtctgcgaaggggtcaattgctcggcgatcaggatcgcgcgctccggcaagtcccaggcgctgtcctggatgcccaggatcagtttcagtacgcgctggccgacgtccgccaggtctgccgcgcgctcggcgatcagcgcattgcccaggccctggaacagcttgacggtcgcgagcgtggcactgttccaggcaaacgcggcgctcttgccctccgccaacaaactgtgggcgtgttccagcaaggtcgggtcttcgagcaattcctggtgagcgcgaaaaatctcggcctgggcactgccagcagccttgtcccgcagcgcctgcaatgcctcagtggcagccagcaggccacgcttcaaagcagcacgctcagtggcttcacccgtgccatgttcagtgatggtcaactcaggttcagtcacttgaaccacctggccaaacgccgaccccggcgatgcacacacgccacctagcacggtcgccgacgactgcgttgccaacggctcggcaacgctcgccactacctcgccacaaccttcagccaacaaggccaccagcgccttgatcgccacttcggcatcctcacccgcagcgctcacctgcaaggtatcgccgtgcacggtttgcagcgccatgatcgctaccagtgatttggcgttggcgctctgggtttgcttgtgcaggtagatgctcgccttgaagcccttcgcggcctgggcgaacaccgccgccgggcgggcgtgcaaaccgttggcattgggcaaagtcagcggtttggagaacagtgcgtcgccctcctcttcgtccactgtgtcaacggcttcacctggggataactgcaacagcggctggccgacctctacacaatcagtggccaacacgctgaacggctcgccgctgaccaccagcatcaaggtcagcagactgcgcgcatggagcgccacatagtcggcatcgaattcgatcagcgcctgcccggcctccacccgctggccttcctgcaccaaccgggtgaagcccttgcccgccaggttcacggtgtccaggccgatgtgcatgagcacctggacgccgttgtcgtcggtaatgctgacggcatgaccactgtcctggatattgctgatcgtcccggccaatggcgcgcagagggtctgcgacgtggggtcgatgcacaggccatcgccgatcaggcggctggagaagaccgggtcgggcaccttgtccagcgccagcagcacacccgacaagggcgccagcaattccaggggttgcgttgtggtcatgacttcacctgctgttttgttctgtagatatattgagcggaggaaggatcacttccaccagtactcaacctgcacaccaacgttcgacccatgccgcgccgtgccatacgagccggtatcggacaacgccgaccccgccgccaattcattcgccgcacgcttggccgcttcgttccaggtggcataggtgtagtacaagcgcacctccggccgcgcccagaaatccgggcctttgggcgaccaggtcggggcgaaggtgaatttgctcagcttgcgcgtcccgcccgtagcctcgacctgatcatgcccaagctccgtgaccagtttgaactgctcgctgatggcgtacgccgggcgcacaccgagggacatccaggtctggtcctggctgcccggacgaatatccttctggtacaccgcttcgatctgcccaccgaaacgcggggtcacctgccagtcgaaaaactccacggcgcggtaacttttgctgctgttgtccaggaaggtattgccggtgtaacccaggccggtgccggggccttcgccgtactgcaaggcgaacttgttcttgccgcccaggaaaggtttttgcacgtgctgcgcggtgatcgcccagccgctgttggtgtcacgcccgccggctttttcgatgtagctaaggcccagctccagctccccgccggggttggtcttgaagcctgcaacgttgaagtcatgacgggtcgcgtattccttctggtacaggttgtccttacgagaaatggcgtagctgtacttgaggtcgccgatcagcacgtcctcgataccaccgcccgtggcgctctggttccagtagtagaagtcggagatatggatgtcattacgtttgtagtaacgccggccggcccacagtgaaccgccattgaggctgggcaggttggaccactgcgcatacatctgcggcatgcgcgcggtgccgttgtcttcgccctggaacttcagcgcgcggtcgtacttgttgtagagcgatgccatggcatcgacgctgagcaccgagccgtcgtcgagggtgagcaggtcctggcgcagctccagctcggcgtattgctcgcattcgttacccaggcggtacttggattgcgcccccggcagttggaagcactgctgcgggccgctgcccgtggaagtgcccgcgccgctgcgcaggtaaccggcaaattccagggcttgagcgccgaacggcaagcccaggcaagacgcaacgaggcccagctttattgttgttttcatgaagcactccgatatttttattatgttttttgaagcgccccgtgctcccacacggggttacaacaggtctcagtccttgaggtgcagcacgaacgattcgtaaggacgcaatgcaaccgtgcccgttcgcaccgggcagtcggggtagttgctgatcagcaggcgttgctcggtcgcctggttgatcacgttgtccggcagttggatttcgcagggcgtgccgtagaagttgttcagcaccagcagacgctcgccctggccttcgcgcaggtacgcccagacttgcgagtggccttgcagcagctcgcgataaactccttcttggatcagcggttcatgacggcgcaacgcaatcaatgcgcggtagtgatgcagcacggactcggggtcatccagctggctttcgacgttgatgatggaggcgttggccggaatgccaatccagggttcaccggtactgaaaccggcgttctccccggcatgccactgcatcggcgtacggccgttgtcgcgggacttctgcatgatcgccgccatgctcgacgccgcggactcccccgcatcgcgcttgagacggaagatgttcagggtctccacatcgcggtactgctcgatccggtcaaagcccggattggtcatgcccagttcttcgccctggtacacatacggcgtgccctggagaaagtgcagcgcggtggcgagcatcttggccgagaccacgcgatgctcgccgtcgttgccaaagcgcgagaccacccgcggctgatcgtggttacaccagaacagcgcgttccagccaccaccggcctgcatgcccagttgccagtcagagaagatctgcttgagttgcaggaagtcgaagtcggccttcacccacttctgcaggttcgggtaatcgactttcaggtgatgaaagttgaaggtcatcgacagttctttcgacgcaggattcgagtagcgaatgcaatgctcgaggctggtggaggacatctcgccgacgttgatcaggtcatgcccttcgaagacttcgcggtgcatttcctgcaggtattcgtgcacgttcgggccgtcggtgtagaagcgccggccatccgtgctgtcctcggggaaatcggcgggcttggagatcaggttgatcacgtccaggcggaagccgcccacgcccttgtcgcgccagaagcgcatcagcttgaacacttcggcacgcaccttggggttgtcccaattcaggtctgcctgggtgtggtcgaacaggtgcaggaaatactggccggtttgcgcctcgtattcccaggccgagccgccgaacttggattcccagttgttcggctggtcgcgccagatgtagaagtcacggtacgggttgtcgaggctgctgcgcgcctgctggaaccattcgtgttcgatggaggtgtggttgaccacgatgtcgagcatcagcttgatgccgcgcttggccgcttcgctgatcagcaggtcgcagtcggccatggtcccgtagctggggtcgatggcgtagtagtcgctgatgtcgtagccgttgtcgcgttgcggcgagcgcaggaacggggtgatccacaggcagtcgacgcccagccatttgaggtagtcgagtttgtccacgatgcccagcaggtcaccggtggcgttacccgcgtggctgtggaagcttttggggtagatctggtagatcaccgagtgttgccagtcttgcatggtgggttccttcagttgattgttgtgcaggcctttcgggcctcatcgggggcaagtcgagtcgtcgcaccgcccctcccacatttgaaatgcgttccaatgtgggagcgggcttgcccccgattgcgccggttcaggcgacgcgatacccaggccgaacaatcttcatgctcaacgcacaggtcaaaacgaacggcacgacaatcgcgatcaccatcccgatcacaaaactggggatgtactgcggcatgatcgaaatgaatccaggcaagccaccgacgccgatcgccgacgcctgcaccttgttcagcgacaggaaaatactgcccagcgccgagccgagcagcgcggcatagaacgggaacttgaagcgcaggttcacgccgaacattgccggttcggtgatgccgaaatacgcagaaatcgccgaggtcgaggccatgcttttgtcccgcgcattgcgggtcatgtagaacacaccgagcgcggcgctgccctgggccaggttggacatcacgatcatcggccagataaaggtgccgccctgggtggagatcagttgcaggtccacggcgaggaacatgtggtgcatgccggtgatcaccagcggcgcatacagaaggccgaaaatcgccccgccgaccatcggcgccaggtcaaacagggtgaccacgccttcggtgatcaggatgccgaggtgacgggtcaccgggccgatgatcgccagggcgagcacgccggtaacgacgatggtggtgatgggcacgacgagcagctgaatcgcattggggacgcgtgcgcgcaaccatttctcgatgacgctcatcacatacgccgccatcaggatcggcaggatctgcccctggtagccgactttttcgatcttgaaccaaccgaagatatcgaagtacggcaggctctggccgtcgagaccagcgaccgccttgccgtagttccaggcgttgagcaggtccgggtgtaccagcatcaggccgagcacgatcccaaggatttcactgccgccaaaccgcttcgccgccgaccagcccaccagggccggcaggaacacgaacgaggtgttggccatcaggttgatcaggctccacaggccatccagattcggataggcctccagcagcgtcttgccctcgatgaacatgcccttggcacccatcaggttgttcacgcccatcaacaggccggcgatgatcaacgcgggcaggatcggcatgaacacatcggagaacacgcgcaccaggcgctgcatggcgttggtcttgtcggcgcccttcttcttcacgtcagcgatagtcgcggcggcgaggccggtctgttcacgcagggcggcgtagaccttctccacttcgccggggccgatcaccacctggaacaatccaccggtgaagaacgagcccttgaccagatcgacctggttcagcgcgcggctgttgaccaggctcgggtccttgagcgccaggcgcaggcgggtcacacagtgggcagcttgctcaaggttgtcgctacccccgaggttctcgagaatctcgcgggcgatagtcgaatagtcgtggctcatgcttggtttccactttggtttttttttattgggggcagtcattggcagcacgccgagggcaaaagtactcgtctgtacgagttaaagcaacaactcgtctgtacgagttacatattgtttattttttgtaggacgccgcaccgctgcgcgccgcataaatccaagggtccaatggacaaaccccagccgggccactaaggttcctgccttgaccgcaaccccggcaaagagccatccccatgagcaaatacaaccagatctatacggatctgcttgccagcatcacgactgaacgcctgcaacgtggcacgcgccttccctccgaaaccgaattgatgaacagctaccaggccagccgaggtaccgtgcgtcgcgccatcgagcagttgcaggagcgcgggtttgcgcaaaagatccacggcaagggcaccttcgtgttgtcgcccaacccgatcgagttccaactcggcggcatcgtcagcttccacgaaacccacgccgacctgggcgacgacgtacgcactgaagtagtcgagttcacccaattcccgctggaaggctcactgctgcaacacatcgaagccgaacccggcaccctgatcacccgcatcaaacgggtacggcgcatcggcggcaaacgggtgatcctcgacatcaaccacttcgtggccgacgtgatccccggcctggaccgctcgattgccgagcagtcgatctacgcgtttatcgaacagactttgcaactgcaaatcgcctacgcccaacgcaccatcgaagccctgccgcgcagcaaggatgaccagacacacctcgacctcgacggtcagagccatgtgatcgtggtgagcaaccagacgtttttgcaggacgggcggcagttcgagtacaccgagtcgcggcatacgttggataagttttacttttcggatattgcgcggcggtaggcacaagtcggggaggtcattgcaccgcgatactcttggccagtcctgccgtccacgcagcagtcatcttctcccctaccagcaccttgggttgaacacccgacacccccgagtaggtggcgtagattttcagaaggtcgtcaaacaggtctttggccccgtcatagaccaacagctcggagagcttgacctcaggcggtgactcaccatccgcgtcatgggcaacgctgatacgccccaactgatgcgggcctacaatgctcaacaacgcgaagtcgtcaaagccgcgcaccgacttgctgaagcgtcgcacaagttcgtccttgagatgtccctcggggatatgcatctcgaacagaggatggactccatactcccagttgtagctttccaggcgcaccggcatggtcagggagacggcattctcttcgctgacggtgtcgttatatgagaaaaccgtatcgcggcagctctcctctccctgcccgagcgttcccgcaggcacgccgccttcgccgatatagagccgctcacgtcgactggtcatggatattctccgatttcagctcatcaagggtcttgcgccgacgtttggggatggccgtcaactcatatcccaagccctcaagaatggctgcgaccttgcgaatccccacttccgggatggtattgttctcaatccccgagtacaaacctgcggccggagctgccttgattcagcctggaactaggccgctaatgccgacgactccattgccaatgacgcgttataaaacatgatgagtagatactttccctgtcgtcgggcattggccggcttatacaaagtctgggtggtgatgctcagcgctcttctcatcgcctgccaatcaccgcgcgaggctctgcaacaactggctgaggagcaccatcgacaatgggaggtcctgccgggagagcactttcctctcttcatacttgcgccgcacactgcagaaaagatcactcgcctgcgtgtgtacctggaaggcgatggtcattcctgggccacggccactcaacccagcctggatccgagcccgcacaatctgttggtaccacggctggcgatcaatgatccgacaccgaatgcgtacctggcacgcccctgccagttcgtcatggtcgcagcctgcgaatcagcgctctggacccaccgacgattttctcaggaagtggtcacccgcctcagccaggcgctggatcaattaaaacagcgctacggcaacagtgagttcgaactggtcgggtactccggtggtgccgcgctcgcattattgttagcggcacagcgcaatgatgttacccaggtgcaaaccctcgctggcaatctcagtccacgcctgtgggcgacgatgaaaggcctgtcgccactcgacggttcactggatccgctggactatcgtagtcaactcgccttgttgccccagcgtcatctcatcggcgaagcagacctgatcgttccaagtcgtttggcggacaggtatcaacaggcgcttgactcgcccctctccgaattcgttcatgtaccgggagcaagtcatgacagggggtgggaagcgacgtggagccgatgggataaaacaccattgatgcatgagaatcctgaaatcaagggaaaataggtccgcttaaaaacatctgaataccattcccctagcgcgaccataaccaccacctaaaagtttcatttgttgctcaattaccccgtaataccgcgaaaaataacggtaacgtcgcatttattagatttttttcgtcacttatcctttttatgatgaattgtcctacaggcatcgtgtagattcccacgcgcttgaatcagcaattcactgacaagctggcagggatgcctaaaacagacgctgacgcgtgggttgttccctgtcagtttctgccctgtaaggatactgccttgaatatttcccacctgcgccgctctttgttggcgctgtccgtcgcgactgctactgcgacagcatatgccgtacccgcccccgacttgaaccacgacctgagcacaggggcatacagcagctccggtgacgtattcaataacgccaccttcaccgggacatcgcaaaacgcaggtgtagagctgaccaacgtgaccctggcgggcaacctggtcaaccagggcaaaatcaacctgacggctgccacccccaccgacttcccgtccggtatcgccatgaccctcaattccaacgtcggtggcgacttggtaaataatggcgacattacggtgagcggtgacgccgtcgtcgggctggacctgtatctggcaaagatcgctggtgaagtgaacaacaacggcaacatcactgtgacaggcgccaatgccgaaggcatgctgatcacctcgtcccaggcgcgcatcaataactcgggcactatcaccgcacgtggcatcgactctgtgggtatcgacatcgagaacgcacgctttacgggtcagatgacgagtggtatctacaacagcgggactatctccgcagacggggtcggtatccgctttcgcagtctcgacacctccggcggttccgacaccctctccatcaggcagacaggtggcctgatcgaaggcggcagcgcagccattctggcggacgacaatgccccacgttcgtatttctactgggagggtggccaggtcaagggtgacctgctgggcctgagtggtgtgctggtgcgaggggacgcgatgttcgatggctcgaccatccgcgccggttacgtcgatatcggcgatggccgcctgacgctgcttcgcccgcagaccacgattgtgggcggcctcgacctggacagcgccaccgcgcgcctgcgcctgctgctggacaacaacacactgcccaacacgccgatcctgaaagtcactggcaataccttcttctctgcaggcagccagatcgaattgcaggcgcgctctgatgacttccgcacgtcggcccagggcacgcgctacaccttgatcaactctggcacctgggaagacccgcagaacctgtccgtggtttcctcctcggcgctgcttgaggtgaggagcttcggcatcgaaggccaggacgtgaaagcactggttgccacccgcagtgatgaggtaatcacgcaagacctgatgagcgcccgtggttcacgcaacgcggtgagcgccatcaaaccattcaagaacacgctcatgggccaactggacgaaagtgacccggtgttccagcaattcgccaacgccgcctccagcgaagaactggccaaactggccgaaagcctgagcccggacgtcagccgtggcgcgatcaacgcagccaccagcagccagaacctggtcgccagtaccctcaaccgccgcgccagcaaagcgcgtagcggcctgtcctccggtgacgtgctggccggacaaggcgtatggctgcaggcactgtccagcgatgccaaccaggacagccgcaacggtatcgacggctatgatgccaacaccaacggcatcgccgtgggcgccgacggcaagctcaacgccgataccacagtgggcctggcttacagctacctgaccagcgacgtgaaaaccgaccagggcaacaagaccgacgtcaacggccatgcactgaccctgtacggcaactgggcccgtgacaacttctttgtcgacacctcactgatgtacggctggaacgacaacgaatccaaacgctacatcgccggcacccgcgccaaggccgactacgacagtgagattttcggcgtcaacgcgctggcaggctacacattccagctcgacaaacagtggctgctggaaccacaggtcggtgcgcgctatgccaacgtatcgattgattcgtaccgtgaaaaaggcagctcagccgccctcaacgtcggcagccagcgctatgaaatcggcgaaatgggcctgggtgctcgcctggcggccgcttttgacgtaggtgtgggcagctttgaaccggaagccaagctgatggcctggcacgacttcatcggcgacaaggccggcaccacctccaccttcgtgcttggcggtaccccgttcaccaccacaggcgcaacaccggcgcgcgacagctacgagttgggactgggcgccaactaccgcgtgggcgcgtggagcgtgggcgggacgtacaactacctgaccagcagcggtttcgacgccgacaccttcactgcgaacgtgcgttacgacttctgatcaacgtctacgtctgaaatgaaaaaaccggcctaagccggttttttcgtacagcgctgcgggatcactcccactctattattaatagctaagtactgggccttaaaaatgcaggcattaaggccgtgcgcaagggtgaaaccatgaaaaataccatgagcacgattttattcccgagggtccaaactgctggaagctacggatttcaagtcaacgtgagtgttcagctgacgaaacacgacagccagctcatcgccgtcgccacctctacggacatccgcgattaattcaatcacatacgacggatctctctgaaaaagctctgccattgcctcatcgtgactgcgatctttcatcacctacctccgcattgagcgcgagcaagccaaatgctcatttgatccttgttgattttcttagcatgtttgctctgtctaaacggctcgcagacattgcattttaagcccgctatcacagcgagaggcatgcgccactagcggtagaccaatgtcaacgggcccccttggcctgcatagctttaccatcacagcccccctgggaacgatgctgccacagaaacctctggcatttcagcttcttaaatggtgccaaattgatatgatcaaactctgatcggtctctcgatgaatgtggccgatgagatccaaactgatgatgcagtcgacctgaattctacggataggagtcgcccatgttgaaccacgaagccaaacgaataatcgatgcggaaataatcccgaaaatggagaccgggaacctaactctgttcttgggtgcagagacattcgctggcacgccatccctaaatggcaaaggagttccgtccaccgacgagcttataaagcgaatttttgagtcggcaggatatcctccagaggaagccctgctaaccgactttcctactgcttttggtgcgggccaggacgacatcgacgactttgataattttttaacatcaaactattcggttagctcagtacatacttggcagacggacatattcaaactatggtggaaaacaattttcaccacgaatattgacaatatagcaaacgaagcattagctcaaaacaagagatcaggacttagctatcccgattataaaatatacaattactcagatagtgaacctgttcatgcgatacccacctcaccgccaatcgtatatctgcatggtacagtaaccaacatttcagccggtgtaatgatcgacggaattagctacggaatcacctcttccaaacaaagcgaatggctgaccaagtgcgcattgaacatcgaatatggcaactgtctatttatcggttcaaaattcaaagggtcagctatagatagcgccatacgatcaaagagtgccgcagacagttttaacagcagggaaccaagctgggtagttggagaaagctttacacaaatagaaaaaagccactacctacgaaaaggaataacgcccctagtagctgatgctggcgattttttttcgtacttgaaatctcaaataagccacgtatccccagaaaagttcttaaaacgtaaagccccttacctagcaggcaatgcaaaccgctccatcggatggttttccgagaatttcgaacacattcctacaaagttagccttagctggcgaagaaagtggtccatactcacgattttacatgggcgacttaccagaatggttctacgtgtcgcatcatgttccggcagtactcccagcacacagagccatcgtttccgaggttaatgcttttttaaatagtgactcaaaatgccgacttatcgctgttacaggaccattaggatcggggaaaacaaccgcatgcatgatggcagcagccgagatctcggtcaaccatcttaacgtgcatcactttaacggtctaaacggtatagaaattgagcatctctggaacactattaaagacacccgcggcctattctgtttagtaatagatgcagcatatgaacatttctacgctgtaaacgccgtttttgaaaggataatggatagagcaacctcttgtagattatgcgttattatagaagaacgaactcgtcaatatgaaagaaacaaacatcactttatgtcaagccaacttgacaatattcgccaaatcaaagtagaaaatcttaatttagcaagtgccaccaaactttatgacaaatcgttcgagttgggcataagattcgaaaaattaataggcaaaacaagaaaaaattcaatcaaagaaattattgattttgacaaagggtataaaggggatctccttgcaactttgtacgatttatcatcacgcaagtcataccgagaaaaactggcagaagagtatcgagaaattgacacccaggaagcccgcgaagtttaccaaacagtagcattggtgactgccgcgcgcctgccactaccgctaaacttcattgctgagactcataacatatcagtatcaaatttagatcgaataatttcagatggtttgagagataaaattcatactcacggcgtagctcgtggcgtctctgcgcgacatcattcgatcgcagaatatcatctcgcttataacattccgcaagaagacatcaaaactcgtcttattaacttgatgatatgcctcgcaccaaagtttacaattgaagacataaaacatcaccctttgagttacaaaatatatcgatccacactctccttccactatttgacggagaccctattcagagggagaaagaattattcatacatacatgaaatttattcgaaatgccaaaatctgtttgcaagcgacggcgtattttggcttcaatatggtcgttttctagaaaaagatgctgatatagaaggggcaatccactgctttagaaaaggtttgggactttatgactcatttcaagttcgccatgctctagggcaaactctgttaaaaaaatatatcaagaatgattattcagaacgtgagctgtacgaggaagggactgccatactcctacgggagatcgaaatgcgcgggcaccacgatgtataccccttcacttcgctagggcagtgcttaattcagattgtcgaaagcaacccttcggacgaagattccttgaacatgttaaaaactgtagtaaataggggcataaaacatcaccaggccgacagtgtttttatggatattttgaagcgatacctcaggttcaacccagacatgacaaacaactaatcgcctccccaaagagcaactgcaagcaaattagttgctcttttaaaactaaaaatcgtctatttatattagattacattgacacggaaagcatcatgattcttgctcatatattcatagcagagcataaagcgttacgtagaatcaacgtcccacttaacggcagctttcgctgcaacttccacaatagcatcttgcatcttagcaaaccgaaaaataccgctgaatattatcatgatcggtattgctcagctctgattggtcccaatggagttggaaaaagtagtgttctcgatatattggaaacattaaacggcaccagcgactctagtgccttgataattttctttgacgaaaccgaagaaaaatatcacatctgcccaatcaacatctccccaaaggagatcaaagaaacaacttgcgacaaagaattcgtatttgtcacaaacagtgcccaattcttatcagaccacaacataaactttgttaaaataaattcaatatcttcgagtgaagatacactaaacttcaaaaaaaccaaacactccccaaacattcacaatctcaccatatatgaaaatgtcaaaaataacgcaaggcaacgtaaatactttgaaaaactgttggcatacttcagagactccttcaacagagaagagttcatggaagagattgttttcgaattcgttttctctagctcgcctattactattgccaaacgaagtatggagacgatagcttcagaaaaagaatatatagaaaaatggataacttacgaacctcaattcgagttatcagacagcgaaatctcacacggcgcagtatttcaaaaactaattgaacttaacttcctatcaatatcaagtgctctagccaaagcttcgaacgccgaagaaaagactcttccgagcatactctttcagtttgacaaaacgtatcatgtaagccctatcggaatgagcacttctaataggctccgaaaagctatcaaagatttagagattgcagattggcccgattttgtacagaactcaattaatcaaggagaaagtgaagaaccattctccaaagatcagattaattttggaaacctccaagctttacttgagaactacctagagattttcgaagaaatagcaacaattctattcgactattgctatgacggcgaaaaacttaacctcaagagtgtaaagacagactattacgatgctgtgcaggatttgaccggtgcgattaaccgtctgccttcgaatattgccaacaacatatcctggggttggcgtggtattagtagtggcgaactagctagaacccacattttctccgaaagctatcactacctaaaatcaagcgattcaaaatctaacaccattttcgtctttgatgaagcagatctgtacttgcatccagaatggcaacgtacatttatccaggaaatgcttgatcacctgagattaatagaagccagccgagatattaaaacctcgcagattgtcatttgtacgcactccccaataattatcagtgatttcctgcctgacgacatagcttcattaacaaaaaatgaagatggcgatatagtagtgacaaactcatatggattcggcaacagtatcgtagatatatatataaaggggatgcatttaacctctacttttggagagcatgcacgtcgcaaaatcgagtatcttcttagaaaagcagaacaaagtacactcacctctgatgatagagaattgatctctaatataccaaatcctaacacaagaaattttcttttaaatcatgataaagatcaataaggctttctcatccgacttcaaggaaacatacgttcagtatgctttgaacgtagttctttggcccaacatttcaaagctcgttgaaactatccctcacattcataggaaactagctaagcaaacattcgataagcgctttcttgaggttttgctaagaagcgaacccgcgtcattcgaggacatcattcaaaggctgtacacgctattcccctatatagctgagagatattgctacagctacctactaaaagaaattgatatcgcaacaaatattatcaacatggcaacagactctccctccgacaggagtgagtttgacaaacttgtaaaacgaacaatccaacaattaaaaaggttaacctcaagatatagactatatcttaccccattcataatcgccgagcttgaatcaagcattcctcgatacaaaaaaaagaaatacttgtgtagattagagaatgcttgccgcggaaactctcagataactgagcgtgaccgagcacttttccctgcttgggtcaaccaacttcccagctgtttcgattatgatgcggtctcacaagaacttggtcaagccatcacagaacagttagaaattacggtttgcccatattgcggcctggagtcaatacaaacatacagctccatatctgtccgaccagacttggaccatttttatccaagaacccgcttcccctttctcgccatatcactttataacctaatccccgcaggctctatttgcaatcaaaaacttaagagaaacaattcaatgttgggacatatgcatcctcacattgaaggcttagataacgatccaatgtttcggtttggcttccttccggacggagatatacgcagcactttctgtctagacatcctccagcaaaatagcaatgccaaaaataataacttaaagcttttcaagataaaagggatatacaatgggaatgaagatcttcgagaatggtactgttgcacttacgagcttcgcgagttccttaaacaagaaggagaggagctgagtaatattgatttcatgtcgccgctttataaaagcgtaatcgacatacgaagacctaatacaaaagtttccgctcaaaaattcaaaatcgaagccctgaatgaactttttcaccaaacgttatgcatcgttgaccagccgatactatgagagggataatttgcacatatttagtagttaacaatacgcattacatactcgaaatcagatacgcgcattaaccataatctccactatattcatttttactgccaagccgatacaatctagaacttgtatcggcttggcttttatattaaaaatataaagtgaacgacggaatagctccccacaattctcctctgttaatatcgacctccccccagtcatctttctcggtgtctaggacagagcaataagtcctagcctaacgaacggtcgcaacgatatagcgcaccaatcgggtggggctgtgtgttcctttacctctcggaccccgtttggcgatcatttgacaacccgcgacataattgcgaggacttcggtctgcaacttccgaaagtcgtccatcatcgcttcaacgtctgtcggcctggcaccttggccgcgcttctctacgagccagagtttcagcagaccggcgacccgtccgaggtcgccgtttaccttagccaaatcggccacggcggtcaggtcaacaacagaccgtattggcgagttcatcccaagggcgcgaaggtagcctgaacgggacattccagcctcgatagcacgctcagtaatcgcctccttttcctcatcagtaacccaaacctcgattggcttgccacgccgccgagcgggtgctttttctttcgtgcctgatggcatgatcgctcctgttgctgctgtgttttcgctctcagacgcggcagcggctgtgggctttgcagagcaaaatccgttgagccgaaggcgaataagggtaggtgttgggagggggcgggcttgcccgtacccgtacaacacacatcttgccgtctgatcttctgcaattctaggcaacttgcccgcctcaggttcgccttgctgccatttccggttatttctgacctataattgccctgaatttctctgagttgcgttaaatttcgctatgaagataaaaaatttactttaattttctaaaatttcctttagttgcctatatcaggtgccgagcagtagttcgatcacataatcaggagacgccaaatgacagacgggccgaaaaaggtgtatcgcggcgcagggcgagttgcctttctggccaggcttgatgactttcgtaagctgatagacgcagggcatccgctacgtgcgatctatgacgattacgccgaacagcttggcattggctacccgcagttcaccaaatacgtctgcaggtatgtacgaaaggaaaaagacgatgggcaccaaaggaaaggctctgggcaattgacatcgcaaagcctctcaccagccccgacaggagtcgtaagaggacagccggagcacagcgccacaccgccttccaaacccggctcaaaacgtgcgggattcgaccacaacccaaatagtggaaacactcgggacgacctgatctgacgctccacgaaacagcgaggccgtgtagcccctttaatctgggagcgaaaatgaggtagaacttttcagtctgtataaatttacctcattaaaaacggtgaacccatggctcgaaaaactctcgcagaacgccgttctgacgccctttcagagctggaaacagctaaagcaagattggcgaaattggataatgaggcggctgaaagaattggaagaattgcaatcaaatcaggattggttaatcttgaaattacagacgatcagattcgggaagaattcgacaatattgtagaaaggatcaggaagggggattgattatgaaaactgctcaccgcatcagcgcattggccaaccaactcaacgaactgcaagcctacctcggtcaagccagcgggcgacctagtaaagccgttagagaagcccaatgcattgcggcagagttggcttcctcgctcgaaaactggcacctagaaacactacacatccctgaaacggagcgtggtcactatcggacccagaccccctattactcagcccactaatgcgctacgccatttcatcaaaagcccacttcggtgggttttttttggccgtaaaaacacatcacgctggaaagacagacaggtccaagcataaagaaaatgccagaaaaattaggttgctacgtgtcaatcccacccaaccatagcccgtaacccattgatttctatgcggatagatacttatccgcatattccaaaccacaccaaatttgtcaataatcaaacctcgaaccatgacaaaacgaggtgttcggcatgaatacggaattgctgaaatcgccgatttcatcggctcggaaatcgagaatacgaactgcccttgttttagcaatgaaaagcacaagtcttagtgtgggcctttacttggccccctcacctgcgtatgccatctactgctcaaactgctcgacgttctatcaacagatgtttgagtacgccgaggcagtcaacacagcgttaaacactgccgagcaactacagacgcagattcagcagtatcagaacatggtcacccagggcacgggcttgccaagcaccatgtttggcagcatcgcggccgaccttaaaaacgtggccaacatttacacccgttcgcagtccctaggccgccagatccaaaatatggactctcagttcaacaccgctttcccaggcttcgagtcctacctgaatcaagcagcgaactcagcaggagttcctgcgcgggatcgatatcagaagtggtcggaacaaggcagcgacaacataaagacggcacttgaggcggcaaacctcaataccagcacgttcgagtctgaagacgtccagcttgatcgcatggtggcccgttcgcagtcagccgtaggccgcatgcaagctatacaggcaggcaacgaaatcgcctcgcagaacgtgcagcaacttcagaaactgcgcgatctgatggccacccaaatcaacatgcagggcaactacattgcccagcaaggcgaccggaaggccgctagcgaagcagttgaacagcagttcgaagcgcgcaaaaacatgcgcggcggcgtgaaggagtactgagagtgactatttcgagatggctcatcgtgttgatgtgcgccgggtccgctttggccggttccctggtcaccgtggtagttcaaagcaacagcaaatttaatgccgtggctgagcaacaacggcagcagcgtgacgctgatgtctcatttgaggcgcgcccgaacactcgcggcggcgtgaaggggtactagcgatggatcgtcgtctgttgttgctcctcgccttggctggtgtgttcgtgggcggagatgctgtggccgcaaccgacctttcccatgccgatacatcgattcagggtctactcgacctcgttttgcaacagtcgcaccagtggtcagggaagctgtatgactatgcgatcagactgttctggctgctggcctcgatccagttcatctggacgttcatgcctctggtcatgaagcaagccgatttcggcgagattgtcggcgagctgctgcgcttcattctggtgatcggtttcttccttgcagtcatgaagtactcggtggaatggtcgacggccattgtcgatagcttccgcgatgcggcggcatcggcgagcggcctcgggcgtgcattagaacccggcgatatgctggcagttgcgctggattttggccgcaccatggtggagggcatttcagtgttttctccagccaagggacttctgatcgctgtatgcgcaatccttgtgttggcatgcttcgccttcatcgctgcattcatgtttgtcacgctcgtagagtcttacgtcatcatcaatgcttccgtgctgttcttcggctttggcggttcgcaatggacgcgggattttgcaattgcgccaatgcgcttcaccgttgcgattggcgccaagctatttgtactaaccctgattgtcggcctgatcgtacagtcggcaaaacagtggttggccgcctacgccaatgacgaagcgtcattgatgacgatggtcggtttggccttagtgtgctgttacctcacgaagacaattcctgacctgatcggtggcatgattagcgggacgtcaatgggcggcggctcggccattggtgggatggctgtggccggtgctgccggggcggcggctgcggcggccaccatcgccacagccggggcggcggctcctgccgctgccctcggtgctgccggtactggtagcgcagccggggccggggcggcgggtgtcggtggactcggcggcggtctggcgggggcgattaactccagctttgccggtgccagctccgcaggtggtgccgcgtcgtctatgggttcagcggcgtcctccggcgtgggtgccagcaccggcggcgcagcggccaagggtgccagttccgcaggcgcgaaggtcggcggcagctctaccaattctcccgggcaggcgtcggccgcgccgtcctctccaagcagcggcctacagcaggccgccaagcaggccggaaagaccgcgcagggcaacgacgacaaagaccagcagacgacacccaaagggggagttgtcagctccggcagcgcactttcccaagcggccgacggtggcgcaaagatgctcggcgtgatggcctcaatggcagtgccaggtatggagaatgcgcacgccttgtctcttggtgcaggatctcccccaccagttcccgacgataccaactcgaccactccagccaatggagcagaatcggccacggaagcttcacacgctgagcctaacgtcatccgtccggcctcggacactaactctgctcccggccgcctcgcctcgctcaaggtgccgggaatgacctcgaacgatcaaccggagaaataaccatgatgggctttctgatgttcgctggattcgtagtattcgcctttacgttcgccatcggcatgtgggcactcggccggtggctacgaagcaaaggttacgggccacagctagataagctggatcggcagtacacggcattgcagcttcgagtaagcccgctggcattgtcggcttcctatcgcatgtttgccggggcgcataccctgaatcgtttgcctctgctgggcagtaagagtagcggcgttctgaaccagcagatgttgatggccatccaagccgcgcaggaagcggagagggaagaaaagcgcggcaagcgctaatcgctgatcgctgagcagccccacactaccccgcctcagtgcggggtttcgctttccacacgcagcggctaagtatgcccaatttggaagaatcaggagacactttcaccagcatcacagatgcggtcaaatgccgggaagctccgccctcagtaatacgcacgtacttgtctcagccctatttattacacctcgctatgggttatacgctgcgttatggtcgatgtttgggacaccggccccctgatcatacatgagcttccgaggcgttttctgaggggttctgacaagcgtaagagatgattcggctaccgcccctttccttcgggtctcaattcaaagaccgcaggaggcacgacgcgccagtctcttgaagatgcataagttcgatgaagcaatcagccctttctttttggtgccaaacgggccgaaggccgactggcaaggccggaccgcgcctcaagcgcgggctgcgccgcgcaggtactgaatatcctgaagatcctgctaaccccgggcggatgtggcacgtttcgggcgggtgtgacgcgttaccgggcgggtgtgacacgccatcgggcgggtatggcacgcttcacctgctaaaagcactgcttttcttgatgcgatcaccatcaagcacaagtccaattatcctcagatcttccgcttcctccttaagccttcgtcgcgcattgcgcatgtcctgacttgaggcttttccggctactgccacgataacggtgtctagataccaaccgcctgtcggcactactttgtggctcaaaacgtgccgagctaccgcttggcttatgccgtgctggaggcgcgcaatgggggccgggtcatagtagagactcagatcatgctcaaggagcattaccagcgcaattccgagacgcacccgccataggtttcgggctccccctgtcagaggatcaggacgtgtcatgggcgaaggtataacgtggtcaatcaatccgccgatgattggaaaatcaaattgcggcgtttcaatcgttatcgttgcggctctcagttcggccagcagcttttcgatctgtgtgaagctgtagcggctatcggaaagtgtctttctcacacgcgcgggatctaccagaagttctacgccaccatctgagacagaccgtcgacgttctgcgcagtacagtacagcttccagtatgtccgcgtgcctctgccctagtctgcctgtcacgcggcagcgcccaaatgatgtttctgcccaattaccctcgcgcagttgcgggcgctggctaggctgataaagcatcactctggcctgtgcgatagaactggtgggaaccacggcgttaccaccgctcatcgtcacttccgtttacgacttgcagcgggctacctttcttcatttccgccaactcaaccggcacaagaacgccgccttcctggcgctggtaccattggtcgagcggggtggcatcgtagttctgcttgctaacaccgaaacgaacaaaaaaacctcttcggtcgttaccgatgggctggcgatcataggcgcgatcgctgagaattttggcctgctcctccgtcatctttgcgacaaagccgcaccagcgggcgttgtcgattagagcggatgcgcctcgtgctgcctgttgctgatcggtttgcccctcgcgggcgctgcccttgctgacatggtgcaggtacaagactgatgccccagtattggtcgcgacgtgctcaagcgtggcgactagccgtgacatgtcgccgttgctgttctcgtctcggtcgtgaattcggcttagggtatccagcactatcaaccgggcaccttcgcaaaactctgtgatacgagcaagatgccgatcatccatgacgttcagtcgtttacccatgatcgactcaagaacgaggttcttcgcgatggactcgcgtgcctgctgatttaagtgctggcctatggcatggatgcggcgcaccaatgcgacttccgggtcttctccggcgaaatacaccactcggccagcgcatgagggggcaagccctacaagatcaccgccggcaacgctgcatgcgatagccatcgccgcttccaacgcccagaagcttttccctgtagctccgggagctaccaatgctcccactgtgccagcgaggaagccgggccatatgaagtccagtgtgggcggttcgttctcgaatgctgcccgtaagtcaatcgccacaactcaagctcccattccgggacgcgtggccgggccggattgcctgcacgtatcaatccatgtctcgacctcttccaaatcccaaacgaccttccggctgctaacggcaatacgacgagggaatttcccctgcttttcgaagttataaatcgtccgctcacacaaggggatcattgccagcaattgctttttgctgatgagcactttgctcgacttcctcgattctttttccacaccgaactcctcgttttgtcgcatttgaggttcgattattgccccatatttccagagcattccacagatatttatggatttattccctttaaaatcagcatcttactgtcctgcaaacgtatagtttcgggacaaaaaaacaacgcgatgtcgttgttctttcacaagtttttttcgtcaaagccgtcaggaaaaatgtgtcccacaaacgggtagtttccggacagaaaaaaacccacaaatgtgggtttcttgatagaacaaaatagatcagcgctcgcttatcccattaccaaaaacgaaatcaactttctgagcgcgtttttttgcgcgtccattcatcaatcatatccgcccaatcttgcaacatcgcccgacgctgatcacggtattcagccttgttgtaaacggcccgtacccccttctgctcgtgcgcaaggcacttctcaatccagtctgagttgtaacctgcctcatgcagcagcgtgctcgctgtgcgcctcaaatcatgcggtccgaacttgctcagcggctgcccttctttctgcgcaagccggtacgtgagcgtcagcacctgattgatcgtcgcggtgctcattggcaaatcagaatcgtaccgggagggaaagacgtagtctgaaccgccagcaaacgtcttcaacgcaatgaagaaatccaaagcctgctgagataagaacaccaaatgaggattacggcgcttcatccgctctttcggaatgatccacaaggcttcgctgaaattgatctcgttccaggtagcgttggtcaactcacttttgcggaccatggtcagcaataacagcttagcggccaccctaacggaggaggcggtgccgatacggtccaggtactgatacatcaacgcgatttcgtcaggccccaaagcacggtcacgtggctcgaatttagcgatgcttgcaggacgaaccagatcagccggattctcgaccttctggccacgctctatcgcccatcggaatacctgcatcacaatctcgcgggagtgaacggccgtggcgggagctccacgctccacaattgcatcagtcagcgttcgcagatcctcatgattaatttccaccagtttctgattaccgaagtgcggctttagctcgcgctcgtaaaccgatcggcgcatgtcacgcgtcgagtcagccatctgatacccacgcagccatttctcagcccacgcatcaaacgtctctgcccctttggtgcgtgccttggcacgggctttctctttggcaggtgacttacccgccgaaaccatctttttagcctcgcccaggcgctctcttgcttccgcaagtgtgatgccacccacgccataacgaccgaacgtgatggtctcctgacggccattgattgagtagttgtaacgaaatgagatggaaccggcagcagtgacggccacgtacagcccgtcacggtcgttcactttgtagagtttttcttgcggcttgaggttacgcagcttggtatcggtcagcatggcagttacggattccatggaaaaaataccatgctcagagaagcactcatacaccgcgataaaacccaatggaaccgggctgatgatgagatttgataccatgcccttccctactagggcgacatggtatcgagcaccgaacatggcatttggctcagtcaatgccccgtaccatgccatacaaacacggtgcttggcgatgcacaaagctgccagaacttgccagacccaaaaagccaaaagcccgcaattacgcgggctccagggcacttcttgctagatggtgccggacaatgccggacgtccaatcattcccactcaatcgtcgccggcggcttgctcgacacgtcatacgtcacgcgcgaaatgccttcgatctcattgatgatacgaccgctgacagtctccagcagctcgtacggcaggtgtgcccagcgggcggtcatgaagtcgatggtttctaccgcacgcagggccacaacccacgcgtagcgacggccatcgcctaccacacccacggatttcaccggctggaacaccacgaacgcctggctgaccttgtggtaccagtcggccttgcgcagttcttcgatgaagatgtggtcggcgcgacgcagcaggtcggcgtattccttcttcacttcaccgaggatgcgcacgcccaggcccgggcccgggaaggggtggcggtagaccatgtcgtacggcaggcccagttccaggcccagacggcggacttcgtccttgaacagttcgcgcagcggttcgaccagcttgaggttcatttcctcaggcaggccacccacgttgtggtgggacttgatcacgtgggccttgccgctcttggcgccggccgactcgatcacgtcggggtagatggtgccctgggcgaggtacttgatgttgtccagtttgttggactgggcatcgaacacgtcgatgaaggtgcggccgatgatcttgcgcttcttctccgggtcggactcgccggccaggttgttcaagaactgatcttcagcgttggcgcggattaccttgacgcccatgttctcggcgaacatggccatcacctgctcaccttcgtgcaggcgcagcaggccgttgtcgacgaacacgcaggtcagttggtcgccgatggctttgtgcaacagggcggcgaccacggaggagtcaacaccgccggacaggccaagcaatacgttgtcggtgccgacctgggcgcgcacctgggcgatggcgtcttcagcgattttcgaaggggtccacagggcttcacactcgcagatgtcgaggatgaagcgcgacaggatgcgcccgccttgcttggtgtgggtcacttccgggtggaactgcacgccatagtaacgacgctcatcgctgaacataccggcgatcgggcagctcggggtgctggccaggatgtggaagtcctgcggcatcttggtgaccttgtcaccgtggctcatccacacgtcgaggccgaacaggccgtcggcgtcgacgtggtcttcgatgccgtccagcaggcggctcttgccgaccacatcgacacgggcataaccgaattcacgcagctcggaaccttcgaccttgccgcccagttgttcggccatggtctgcatgccgtagcagatgccgaagaccggtacgcccaggtcgaacacggcttgcgggcaacgcgggctgttggcttcgtgcacggactcggggccaccggcgaggatgacgcctttcggtgcgaattcgcggatcgcttcgtcgtccatgtcgaacggatgcagttcgcagtacacgccgatttcgcgcacgcggcgggcgatcagctgggtgtactgggaaccgaaatcgaggatcaggatgcggtgggcgtgaatgtcgagggccatgaagtcagtctcgtctaatgaatcagaaacaactcggggctgaagaacagccccggttacttaacattttgctggaagcatcaacctacacggtagtttggcgcttccttggtgatctgcacgtcgtggacatgggattcagccatgccggcgccggtgatccgtacgaactctggcttggtgcgcatttcttcgatgtcggcgctgccggtgtagcccatcgaggaacgcaggccgcccatcagttgatggatgatcgcgctcagggtgcctttgtacggcacgcggccttcgatgccttccggaacgagcttctcggcacctgccgaggagtcctggaagtagcggtcagaagagccttgcgcctgggacatggcgcccagcgaacccatgccacggtaagccttgtaggaacgaccctggaacagttcgatctcgcctggcgcttcttcagtaccggcaaacatcgagcccatcatcacgcaggaagcaccggccacgatggccttggacaggtcaccggagaaacggatgccgccgtcggcgatcaacggtacgccggtgccttcaagggctgcggcgacgttggcgatggcgctgatttgcggcacgccgacaccggcaacgatacgggtggtgcagatcgagcccgggccgataccgaccttgaccgcatccgcgcccgcttcggcgagggccttggcggcagcgccggtggcgatgttgccgccgatcacctgtacgtcagggaagttctgcttgacccaacgcacgcggtcgatcacgcctttggagtgaccgtgggcagtgtcgaccaccaccacgtcaacaccggcagcgaccagggccgaaacgcggtcgccggtgtctttaccggtaccgaccgcagcgcccacgcgcagacgaccttggtcatccttgctggccagcgggtaagccttggctttttcgatgtcgttgacggtcatcatgcctttgagggcgaatttctcgtcgacgatcagcacgcgctcgatgcggtgcttgtgcagcagttcgcgcacatcgttcttgtcggcgccttccttgaccgtgaccagacgctctttaggcgtcatcacttcacggacggtgacttcaagacggttctcgaaacgcacgtcacgggaagtgacgatgccgaccaggtcgccatcgtgcagtaccggaacgccggagatgttgtgcaggcgggtcaggtcgaacaggtcgcgcacggtggcgtcggcttcgatggtgattggatctttcaccacaccggcttcgtaacgcttgaccttgcgcacttcggcagcttgctgctcgatggtcatgttcttgtggatgatgccgatgccgccttcctgggccatggcgatggccagacgggcttcggtgacggtgtccatggcagcggaaaccagaggaatattcagctcgatgccacgggttaggcgggtcttgagactgacttcgttaggaagcacctcggaataaccgggcacgaggagaatgtcgtcgaatgtcagagcttcttggctgatacgcagcatcgcgggggctcccgagcgggaaaatggaagcgcgccattatatacatgcaccctgtcgggctcaatgtaaaactctgacaaacttggtaatactgatagatgggtaatttaactgtcccgatcgttcccacgctccgcgtgggaacgatcggatcaggagggttacaactcgactttgacccaactcatcttctggtccagccaatcggcgaattcgtcgataaaactctgcttgaaccccgcttccgcccagttgttgaagatgaatcccaggttggaaaacccgcattcctgcaggaacaggaacccgttgatgtcgtcttcatgcccacacagcgggcaggtgaagttgtcggtgtggccgggcatccagtcttccaggctttcgaacagcgcttcgccgacttccttgcggcattccgggcaaccggcttcttcgagaaagcccttggccggcgtgtagatgcagcgcttgtagatgatctccaggccattgatcggctcgttgaacggcagtgcctcggggtaaagcaccacggcacgggcgccatcggccagggcgtagcccatgcggttgccggtgcggccacaggtggtcagctcttccttgatgatgttcttgcgcaccagccagcgcacgatcgcccgggcgcggggttcgtggacgggcaaggtggagattttcgggacaaggatgctttgggaattcatgggagtcctgcggtgtggccacttgcccccgaagaggccctgaaggcaggcagcttaatccctgaaaagaacaggtcaagtactcaaataccgcccgatcaatgcaataccgctggtcagcaccagccaggtcaccagccgcacaaacgcctcacgcgacatgcgcatcgtcaacctgcgcccacaccacagccccaacgccatcgccggcaacaggcacagtgccaacatcaacaacggtaaatcagcatacaccccggcgatcaggaacagactgaggcgcaccaccgtgctgcaactgatcaacgcactctgggtggcgcgcgccgcgtctttggacaggcgactgttgaggtagatcgcatataagaagccaccactgccgaacagcgccccgaacaacccacccaccgtgcccatcggtatcgaccaccccgccgccagttgcgtcggccgcgccttcaccgccaggctgtagagcgcgtaggcgctgataaacaggcccatcaacaacagcagcaggtccgaatgcaagttgagcaaaaacaccacgccgagtgtgcagccaaccgccatgcacggcagcaatcgcagcaactccggcttgttcacctcgcgccgcgattgcagcaggttgccaaatgccgcgacaaaatccagcagcaccagcaaagggatgatctttgacagtggcataaacacgatcagaatcggccccgcgaccagcgccgtaccgaagccagcgataccgaacacgatataggccacgacgatgcccaggccgatcaccagccaatccacagcgccaaacgaccactgactcatcagctcaaccgggctcatggggtattccttgtacgagatgatcatcactttagccatcggtgagagatgcgactaatatcttcaaagcccgccacctatctcgaaaaggcatgacgcgtgatatcaacccgccaactgcgttacttcgtcgaaatcgccgactgcggcagcttcagtgccgccgccgaacgcctgtttgtggcgcagtcagccttgagccgacagatcaaggagctggaaacccagctgcaaaccccgctgttcgaacgcaccgcacgccaaccgaggcttacggcggcgggcgaagccttctatccgcgagcccgcaacctgctgagtgaactgctcaaggccagccaaatggcgacacaagtgggcaatggcgaactgggcacgctacgcctgagccattcgagcactgtgccgatgagcggccctttgctgcagggcatcagcgcttggctggaacgctgccctggggtgtcgatggacatcgtcaaactgtcctccgaagcgcagttggaagaaatcgccgaaggtcgccttgaggtcggcgtgctgcgctcgccggtgctgcgccagcgcgagggggttcgggtgatgcctttgtatagcgagcaactgctgctggccgtaccgcccaaccatgcgttagcgcgtagtcaggcgcccatcgagctagggcaattgaaggacgaagcgtttatttcaataccccacccccagcgcggcggcctgagttatctatcagccgagctatgcatgcgtgccggatttttccccaaggccgcgcgcgtgatgtcgcgcaagaccacccagttgcaattgatccaggccggcttcggtattgccttgttaccaaaatccatgcaggacatcgcccccgccaacgtgcactttttacccctggccgacccggactgcctcagcaccgtggccctggcctgcgcacaggcgccgagcgcgctggtggagcaattctgtcaaaccttgcacgaatgcctataaactgccgcccatgattaaagatccttttgctcgtttaggcctggaccgcgaagtcctgactgtcagccagctcaacggccgtgcgcgggtgttgctggaagacgtgttcaccaatatctgggtcgaaggcgagatctccaacctcgcccgcccggcctccgggcatgtgtatttcacgctcaaggacagcggcgcccaggtgcgttgcgcgttgttccgcaacaacgctgcgcgggtgcgccaggcgctgaaggatggcctggcggtgaaagtgcgcggcaaggtctcgctgttcgagggccggggtgattaccaattgatcctcgatacggtggagccggccggtgatggggcgttgcgcctggcgttcgatgcgctgaaggaaaagctcagcgccgaaggcctgttcagtgccgaacgcaaagtgccgctgccggcgcatcctcgacgcatcggcattatcagctcgccgacaggcgcggtgatccgcgacatcatcagtgtgttccgtcgccgtgcgcccaacattgaactgaccctgatccccaccgccgtgcaaggccgcgaagcgatcccgcagattgtgcgcgcgctgaaactcgccgatgcccgtggcttcgatgcgctgatcctggcccgtggcggcggctcgctggaagacctctggtgtttcaacgaagaagccgtggcccgtgcggtggacgcctgcgtcacgccgatcgtcagcgccgtcggccacgagaccgatgtgtcgatcagcgacttcgtggcggacgtgcgcgcccccaccccttccgccgcagccgaattgctcgcgccagacgccagccacctggtgcgccaggttgaaaacctgcaccgccgcctggtgctgctgatgcgcaaccgcctgagccacgaccgcctgcgcctggaaggcatggcccgacgcctgcgtcaccctggtgaacgtctgcgccagcaagcccagcgcctggacgacctggacatgcgcctgcgccgtgccttcgagcgcagcctcaatacccgccgtgaacgcctgatccgcctggaaacgcgccttgccggccagcacccgggccgccagttggccctgttgcgccaacgcctggacagtctcgccgaacgcctgccccgcgccatgcgcgaaggcctcaaggcacggcgcctgcaactgcaaagccagatgcagacgctgcacgtggtcagcccgctggcgaccctgggtcgtggctacagcatcctcttggatgaacgcggccaggccattcgcaatgccgcgcagacccacaccggccagcgcctgaccgcgcgcctcggtgagggccaattgcaggtgcgggtggaagacaaccacctgacacccgtcaccctttcgttattggattgattgatgccacgtctctttagtgtgttgatgctgctgtgccttgcctttaacgcacaggccgacagctacattacccgaaccctcaacaagcccgtgcctggcggggttgccgtggtcgaacttggcccttccgctgccgcacccaaagccacgtacctgggcaagccggtactggtggtgaaagaagcggacacctggctggcgattgtcggtattccgttgacggtcaagcctggcaatgagcgcatcagcagcggcggacgcaacctgccgtttatcgtcggctacaaaaagtacccggaacaacgcatcaccctgaaaaacaaaagccaggtaaaccctgacccggcgcagctcaaacgcatcgaaggcgaattggcggtgcagctcaaggcctaccgcagtttcagccctaacctgccgagcaacctggtgctggacaaaccggtgaacgggccgctgtcgagcaagttcggtgtgcggcgcttcttcaacggtgaagaacgcaatcctcattcgggcctggactttgcggtgccggccggtacgccgatcaagacgccagccaacggcaaggtgatcctggtgggcaactacttcttcaacggcaacacggtgttcgtcgaccacggccagggctttatcagcatgttctgccacatgtcgaaaatcgatgtaaaagtgggcgatcaactcacgcgcggcgcggtggtgggcaaggtcggttcgactggccgtgcgaccgggccacatatgcattggaatatcagcctgaatgatgcgcgcgttgatccagcgatctttatcggcgcatttcaaccctgaaccccgggcatcggccggcaccattcggtgccgtcgccggagcttttcttaccgatgcaacaggaaccaaaccatgctgaacacccacccattcgacgacttacaaggagcgtaaacgacactcaacctaccctgtgagacactccctatgtttgctaccgcgcaagcccttatgtcagttgcttctcggcagaccaccacgctacgtcagaccactccgcccgcaaccgacaaccgcccacctacttccagctctcccactgcccacctgaccttcgcgccagacttcccccccctccccagctcatcaggcatccccccagccacacctagcccacttgcaaagcactttaacgtcagtgaccagcaggcctttctggatcaacacgacagcctcaccctcgagatgcaacgcctacacaatcagcaacccaccttcaaggcattcctgcaaagcgaactggaaaaagcgtttccagacgtcaggccgctcaacgccgaaacgctctcgttcaaccgttaccgcagagacggcgatcacgaaacactggcctcttccgagcccttgatgaccgccctcgcccgaatgatgcaagagatccaggccaatccgaatcggctgagatcggctgagcgcaacatccgcacggagttcattacccaacaaactgccaatgacagtgccacgccagccattacctcaggctccttgcaatccatcgccagagcgatcgtcacgcagtaccccgcaacgctgcaggcattctggacgacacctcgcccaggcacgacacccccgcagacgccccaggaccacctgctggccttgcacaaacaacaactatcgaccctcgccgcactgcgcgcagcagacggcacgctaagcccggccagcaagacgctgatcgacaacgcactgcaataccccaccctggccgagcgggaaaaagccttcgccgatggcgcgcgcccaggtgtgtatccgctcactctcgacgacggcaccgagcgcggcgcactgctggcgggcacctttctgatcacacagaccgatgggtcctttgcctcaccacccacctggcccaaaggaaaatccttggcgctcaacgacgcccatggcccggtcgtgctgtacaccccaggcgacggtttcgaggagtttgccacgccggcccaggcgcgccaggccttggcaaaacggcttgacgagggaggcgtcaacgccgacctgctgctgcaaaccctgcccctatcgttgcaaaaccgccccgaaccgcccaacggggaagacctgatgctcagcgtcgcaccgctggatggcgatgtactggccgaaggcgtcccctggatgctcaagcgccagcaggcagaagtcgaagcgaaccagctcaaagccccgctgtcagccacggccatcgatgacgctgccgactggtcgtatctgctcgaaggcaccaatgccttgcaggcacgtaatcaagcattggcggataagctgcaacccgagtggctgaaaaacctgagccccgcccaagaagccctcttcgcccatctggagcaagcgcaagaaaaaagcgccgatgcgctggtgccgctgcttgaaactattccggccctgcccactttcgctcgtgatcggatgaacgaagcgattaaaaagcagtacccgaatgccgaggtgaatgccgatcaactgatggttcaggtccgcaccaggactcacgtcaacaacggtcgaaaaaccagcagccatacgcctttcgaaaaaaacaaacaggtatcgctcaccgacctggccctgaaaaaccccaccgagttccccgccggtgaaacggccacgttcacccaaaccaccttcaaactgcctctgagcgacaaacagggcaaaccggtgctcgacgccgatggcaagcctgttgtactggacaccgaccaactcaagcccctggtcaacgccgccgatgtcgggggtgaatacaccgctctgctgaaaaaagaactggccacagacgccgtggcgggcctggcaggacagcggcgtgacgcatggaaagccagccaggctgacctgatggccaaagaggcatttctcgcagaactcaaccccgatgcctataaagccgaagccaaggaggacaagaccagcaagcgcggggcgcaatgggtcgcggccgtactggatcaccccgacccggccaaccgcccgcaagtcgatggcgaaaccatcgagacccacgccctcgtccaacgtggcctgccggttcaaggcgtgatggtgatcggcaacagtaaagatgcggagcgggtgctatacacgccgaatgcacccgacggcatcacgtttcgcgaagtcgccagccaacaggcactcaacaccctgctggaaaaaaacgagtggaagctgtacaccgcgaaccgcaagtcgccggtcagcaaagatgacgtcgcccaagcgaaacagaccctcgacaaacacaagttagatatggcgaggaaccccgccgcagccatcgagaccttcgtcaaagccctcaaactgacaggcgacacatccaccctcacccccatgaccggcaacagcctggatgcgctgtacaagcaacatgtccaattgctgaccgacagggccgaccaccaatccgtcagtagcgctgaagtggcaacgcagtcaagggccaacaaagcgcaattcggtgtggatgtggcgctgatcttcctcgatctgttgcccgtcgtgggcaaaggcgcctcgatgggcgtacttctgggtaaagccggggtgacggcgctgcgtgccaacgccagagtcttgcccaaactgatcaggaacccggcacttggccgggcaatttatgctgactttgccacggcaggggcaggtatgcccgtggttcggacctcgccgctgcgcccggttgccaaggcgcccttgcgcgccattgagcccgcaccgcgcccaacacccagggcgctaccggcgcccgacggcccgccaccggccacgccatcgaccagtagaggtattgtcgcccgaatcgaacagcccaccatcacgaatgtaaaccgtgacctgagcgcctatgccgtgccgaatgacgtgatacagggcgccgtattaggcccaggcagtacttatagggtgggcgacgacttttacgtgcgcttcacggacggcacgggagagcaaagggtttaccagatagagtcgaactttcatgcccgggatggacaggtcactgtcgtcaatccccatttgccgcccacgacaaacaggtcaaacagggccgtggcgtttctagtgtccacaggaaatggcgagtggcaaatcaacaatctggtcggggccgggcgtcatcggggcagacatttgccacccgaagacgtcacctacatggaccggatactctccggcagagcagcctatgatattgatgggagcgcagttactaccgggcaagtcagacgctggttccggcgcgatatgaatagtttctacgacgccctggcaacaggcggcatgccgacacgacctacgctacccgtgatggcgatcaacagtacaccggattcggccatacaaaacagcctgacccaaaacggtgtacgggggcttgtgctgggtgaaatgcatgatgagcctgcggcgtatcagttggtcattgatcagatgcagaacttcaaaaataacggcgtcaccactctgtacgttgagggcgcgccattcctgcagggttctcccaacatttccgacgcagcgctgcgcacctccgatgcggcctactttggccagcatccttacaacttggactacaagagcggccctacgcttacggatatcatcaaagaagcagacaaacatgggataaaagtcgtcgggctagagcaccagcaattgacatggcgtaccgacgatcccatgcatatgtacaaacatgcgctgggccagcagaaccgtcttagagaattcaactatcatgctgcaaaaatcatcgaacgcaccccgcccggcgaaaagttcgtggccatcgtcgggaaatttcatatgaataccgaactgggcgtcccaggcatcgctgaattgaccaacggtatcggcctgtctgtaacgccttcgctaaaaggcagctcaagcctggtcagccagccaccgcacacaccgccaccgtcactgaagttgcagcgcggtaccaacgtccctgagccatacggcgatattcatgtcgattacaacgtggatgcgttgacgaactagacacgccctataaacctcggtcacgccgcctcaacgcggcgtgattattaattgcgcaccagcaaaaacaagcagcaatcaatcactaacaattctcaaaaaacaaatcattaatttcgaaaaatcatcaaaaaacgaaaattatctcaatttttttttgcaacttgccatcccattcgctggcggttagggttgagcccatgaaaacctctcacaccctcattcagctccgccagcaccgcagcctgtgcctcgtcagcgcacgactgccaggctgaatcgatctgcctcgtctttacgttttatccccaaaaacagttccacggcaggccgccttttctcggcccctacaacaaaggatttcccgatgagcatgctcaaagacccgtcttcgaagtaccgcgcgtttccgaccatcgatatcccgaaccgcacctggccatcgaagaccatcaccgaagcgccgatctggtgcagctccgacctgcgtgatggcaaccagtcgctgatcgagccgatggacgcggtgaaaaagctgcgcttctggaagaccctggtcgccgtcggcgtgaaggaaatcgaagcttcgttcccggccgcctcgcaaaccgacttcgacttcgtgcgcaccctgatcgaagacggccacatccccgaggacaccaccatccaggtgctgacccagggccgtgaagacttgatcgcacgcaccttcgaatccctgcgcggcgccaagaaagccatcgtgcacctgtacaacgccacgtcgccgtccttccgccgcatcgtgttcaaccaggacaaggaaggcatcaaggccatcgcggtcaacgctgccaagttgttcgtcaaatacgccgcccagcagccggaaacccagtggaccttcgaatactccccggagaccttcagcgctactgagctggagtttgccaaggaggtgtgtgacgcggtgatcgaggtgtggaacccgacgcccgagcacaagatgatcctcaacctgccggccaccgtggaatgcgccacgccgaacatctatgccgaccagatcgaatggttcggtcgccatatcaatcgccgtgacagcgtgatcatcagcctgcacacccacaacgaccgtggcaccggcgtggccgccaccgagctgggcctgatggccggcgccgaccgcgtcgaaggctgcctgttcggcaacggcgagcgcaccggcaacgtcgacctggtcaccgtggcactgaacatgtacacccagggcctcgacccacagctggatttctccgacatcgatggcgtgcgcaaagtcgtcgaagagtgcaaccagatccaggttcacccgcgtcacccgtacgtgggtgacctggtgcacaccgcgttctccggttcgcaccaggatgcaatccgcaagggtttcgcccagcagaaagacgatgcgctgtgggaagtgccgtacttgccgatcgacccggccgatattggtcgcagctacgaggcggtgattcgcgtgaacagccagtcgggcaaaggcggcatcgcctacctgctggagcaggaatacgacatcagcttgccacgtcgcatgcagatcgagttcagccaggtggtacaggccgaaaccgaccgcgtcggcctggagatgactgcaccgcagatctatgccttgctgcagcgtgaatacctgcaagccaacaccccgtacgcgttggtcagccatcgcctgcaggaagagaacggcaacagctttgtcgaggtggaagtcgcgggcaagggccagggcgaaaccaacctgcactggaaaggcaaaggcaacggcgccctggaagcgttggtggccggcttgccgattggcgtggagatcatggactacaacgaacatgcgatcggtgcgggcaccaacgccaaggcggcggcctacatcgaactgcgtgtgaacggcgagcgaccggtgcatggtgtggggattgatgaaaacatcaccacagcgagcttcaaggcgctgttcagtgcgctgaaccgttcgttgagccagcaggaagcaaaagcagcgtaagcagtctgcttaaaatgtgaaaggcccctggatatgagtcctggggccttttttttggttttttgtggtctgtgagggcctcatcgggggcaagccccctcccacattttgaatgtattcacaaattaaagtgtgggagggggcttgcccccgatagcggtctgtcagacaaactggaaagtatcggcatccaggttggctggaaacctggtgcgatacgcggccaattccgccgcatccaggctcacctggaacactccatccgcctcccccgcactcagcagcgtctcgccctggaagtccaacacctggctatccccggtgtaggcaaagcccttcccatccgtgcccacccgatttaccgccgccacataacacaggttctcgatggcccgcgccggcagcagtcggttccagtgcgagcgccgcgcccccggccagttggcggtgtacagcagcaggtcggtgtcctgggcatcacggctccacaccgggaaacgcaggtcgtagcaaatcaacgggcgaatacgccaacctttcacttcgaactgcacctggcgctcaccgggggtgtagtggttgtgctcgccggccatgcggaacaggtggcgcttgtcgtaatgcaacacctcgccatccggccgtgcccacagcaggcggttgcggtggctgccgtcggcagcctggatgatcacgctaccggtgatgacggcgttgtacttcgcggcctgtgcctgtagccaacggtgggtcgggccgttctcgggttcggccagggttgctgactccatggaaaaaccggtggtgaacatctccggcaacacgatcagatcagcgcctttcgcctgctccaacaataacccgaagtgctcaaggttggcttggcggtcgtgccaggccaggctggtctggaccagggcgatgttcaggttcggcagagcactcagatcgcgcatagtttttcagccgcttgttgcagcgtttcctcacgtttggcaaagcaaaggcgcaccaggcgctggccttggggtggggtctggtagaacaccgagaccggaatcgtcgccacgccgtgttcgcgggtcatccatagcgacatggcgacgtcatccaggtccgggcggatctgtgagtaatccaccagttggaagtaggtgccggtcactggggtaaagctgaagcgcgatggcgccagcaggtcgcagaacagatcgcgcttggcctgatagaacgccggcaactcatcgacatgctccgggtgctcagccatgaaatcggccagcgcgtactgcaatggggttacgccacagaaattgacgtattgatgcaccttgcgcagttcgccggtgagggccggcggggcgacgacgtagccggttttccagccggtgacgtggtaggtcttgccgaaagagctgaccacgaaggcgcgctggtagagttcttcgtgggccaacacgctgacatgggccacgccgtcgaacaccaggtgttcgtagacctcatcgctgaccaggtagatgtcacgctcgcgaatcagttcggccaactggtccagttcggcgcggctgatcagcgcgccagtcgggttatgtggggagttgaggatgatcatgcgcgtacgcggtgacagggccgccttgatcttctcgaagtccagcgcaaagccatccaggcgcagttgcacatgcacgcagcgaccacccgccagctccaccgacggctcgtagctgtcgtagctggggtcgaacacgatgacttcatcaccgttgcgaatcaccgcctggatcgcgcagaagatcgcctcggtggcgcctggagtgatggtcacttcagtgtcggcattgactgtggcgccatagctgcgggcgatcttggcggccacctgctggcgcagcaccggtaagccggtcatgggcgcgtattggttatgcccgagggcgatatgcttgcccactgcgtcgagcaaaccctgggggccattgaagtccgggaagccctgggacaggttcagcgccccggtctcggcagcgagttgcgacatggtggtaaaaatggtcgtgccgacattcggcagcttgctggtgatcatgggagcccccttcggctgagctgcaagttttaagctgcaagccataagcaggtcaaggggcaaaccgccaggcacaaaaaagggctccaaaggagccctctcttgcagctaacaacttgaagctacgattacttcttatcgcggcgcttcttgtcggccttcttatggtgagtcatcaaacgacgcttcttgttcacctgacggtcagtcagtgtgttcttgttgccttcgtatgggttctcaccacccttgaactcgatacggatcggcgtaccgaccagtttcaagacacgccggtaggtgttttccaggtaacgcacgtaggacttgggcaccttctcgatctggttaccgtggatcacgataatcggtgggttggcaccgcccaagtgggcgtaacgcagtttgatccggcggttgttgaccatcggcggcgcgtgctcgccaaccgcgtcttccaagatctgggtgagacggttggtcggccagcgggtgaccgcggacttgaacgagttctgtacggaagcgtagaggttgcccacgccggtgccgtgcagtgccgagataaagtggatatcggcaaactcgacgaagaacaggcggcgttgcagctcgatcttgacgaaatcgcgctcgctcggcgtcatgccgtcccacttgttgatcgcgatcaccagcgcacgtccggcctccagggcaaagcccagcaggttgaggtcgtggtccaccacgccttcgcgggcgtccatcacgaagatcaccacgttggcgtctttgatcgcctgcaaggttttcaccaccgagaacttttcaacttcctcgtggatcttgccgcgcttgcgcacaccggcggtgtcgatcagcgtgtacttttcctcgttacgttcgaacgggatgtagatgctgtcgcgggtggtgccgggctggtcatagacgatgactcggtcttcaccgagcatgcggttgaccagggtcgacttgccgacgttaggacgaccgatgatagcgatcttgataccgtctttttcgctcgggccaggaatgcgcttggcttcctcaccttcggcgacgatttcctcttcgccctcttcttcctcgacgtcatccttggggaaatcgcgcagggcaatttccagcatctgggtgataccgcgaccgtgcgccccggcgaccgggatcgcatcgcccaggcccatcgggctgaattcggctcgggcagcttcaggatcgatgttgtcgatcttgttcgcgaccagataggaacgcttgttgcgcttgcgcaggtgctcgccaatcatctggtcggcagcggtgtagcccgcacgggcgtccaccaggaacaacacgacatcggcttcttcaatggccagcaacgactgctcggccatcttttcgtccatgccatgctcgtcaccggagataccaccggtgtcgacgataatgtaggagcgcccttgccactttgcctcaccgtattggcgatcacgggtcagaccggacaagtcgccgacgatagcgtcgcgagtcctggtcaggcggttgaacaaggtggacttgccgacgttaggtcggcccaccagggcgattacgggaaccatgcggctctccacttcgttatttcagaaaatacaaaagccgctgcaaggcagcggctggtgctcggggcagcataatcaaatgccgcatgccccgccgaagcggggccgcctgggtgttaccccaagcatagttcttacttgatggtcagggcttccagcttgccgctgttgccaaacacataaagcatgttacccaccaccagcggacgcgcacgcaggccgtcgctgtcgatacgctcgcgaccgacgaaacgaccatccacctggctcagcaggtgcaggtagccttcgaagtcaccgaccgccacatagctggagaagacttccggtgccgacaactggcggcgcgccagggagtcgttgctccacagtgccgtggtggaacgctcgtcgacactttcgacagtgccggacgccaggctgacatagacgctgccaaacccttgggcgacaccggcgtagctggaagcatcacgctgccagttgacgcggccgctctgcaggtccagtgccgcaacacggccctggtaagtggcgacgtagatggtttcacccgacaacagcaagccaccgtcaatgtccactacgcggtccagctcggaacgaccttgcgggatggccacacgggtttcccaggccggcacgccgttctgggtatccaaggcgaccactttaccggtcgacaggcctgcaacggccagattgttggtcacaatcggaccactggtaccgcgcagcgtcagcaccgcaggcgtgctgtcgtacaaccaacgctgtgcgccggtgctggcgtcgaggccgatcacacggtcgtcctgggtttgcaccacgacgatatcgccgttggtggcaggcggtgcgagcacttcactggtcacgcgagcgcgccatttctcttcgccggtgctggaatccaacgccacgacttcgcccttgagcgtgccgagcaagaccatgccgtaacccacgcctactgcgccggataccggaatttcgaggtctttcttccacttcacgtcgccgttcatgcgatccatggagatcactacgccggtcacgtcagcagcgacaatgttgtcaccgtcgatagccggtaccagcatgttgtaggtttcgccctggccgtcaccgatggagcggctccactgcttttgcaggaccacttcttccttgaagctggtcagctccgcaggcggcagttctttcttactgttgctgctgcaacccgcggccagaacggccagagccagcaatgctgcatgtttccaacggatcacgtcacgcatcccctttggccaagtcgtccagcttgatttgtaagccaccgaccgccgcttcatcagacagcgccgccttggctttcttgtacgcagcattggcttcgtcggtacgacccaattggaccaacaggtcgcccttgagctcttcgcgagtggctacaaatgccttgtcagcatcgccgtcgagcagtttgagtgcttcgtcagccttgttctgtgccgccagtacctgcgccaggcgctgacgtgcgatttcacccagggtcgggttggtcggcttgtcggcgatggccttcagctcagcggcagcgtcgtccagcttgccggtgtcgaccgcgactttcgcgacgaacaggctgccgtattgggcgtaggtgctaccgccgaattcgttcttcagcttgccggccaggtctgcaacctgcgcagggtcgggcttgccgtccggcgtcagggtggtttccaacaattgctgatagaggatcgaggcgccttgggactggttggcctgatacttggtccaggcttgccagccgaagacaaccactaaagccagcagaccgccagtaaccagaggcttgccgttgcgctgccaccagtccttgaactcggccagttgctcatcatcagtactcgacaccccaatactccttaatcgctaaattcggctgttcgacagcttcaaccctgcacgacgcaggtggccaagtgcgcagcgagcgcatcaaaggcaatgttctgttgctcaccctggccacgcaggggtttgaaacctatcacttgctgggccagttcgtcttcgccgaggatcagtgcatacaacgcaccgctcttgtcggccttcttgaactggctcttgaagctgccggcgcccgcattgacttgcaggcgcagattgggcagttggtcgcgaaccttttcgctcagggccagggctgccagttcggcggcctcgccaaaggcgcacaggtacacgtccacctgacgggagatctcttccgggacctgctcaagggtttccagcagcaggatcagccgctcgatgcccatggcgaagcccacaccggtggtcggcttgccgcccatctgctctaccaggccgtcgtagcggccaccagcacacacggtgccctgggcgccgagtttgtcggtgacccactcgaatacggtcttgctgtaataatcgaggccgcgcaccagcttggtgttgatcacgaacgggataccggccgcatccagccgagccttgaggccctcgaagtggatacgagactcgtcgtccaggtagtcggccattttcggcgcattgaccagcacggcctgggtatcggcgttcttggtatcgaggacgcgcaatgggttggtcttcagacggcgctggctgtcttcgtccaacttgtccaggtgggcggacaggtactcgaccagggccactttgtagcggccgcgggattcactggtgcccaggctgttgagttcaagcttgaccgcgtcgcggatacccagcaggccccacaggcgccaggtcagcacgatcagctcggcgtcgatatccggaccgtcaaggttgaacacctccaggccgatctggtgaaactggcgatagcggcctttttgcgggcgctcgtgacggaacatcgggccgatgtaccacagcttctgtggctggccaccaccggtgaggccatgttcgagcacagcgcgcacgcacgcggcagtaccttccggacgcagggtcagggagtcgccgttacggtcttcaaaggtgtacatctctttttcgacgatgtcggtcacttcaccgatggagcgcttgaacagctcggtgaactcaacgatcggcatgcggatctgcttgtaaccgtagttatccagcaggcgcgcaacagtgctctcgaagtagcgccacagcggcgtctgctccgggaggatgtcgttcatgccacgaatggcttgcagagacttgctcacatcaaatccttaaattcgttcttagccgcgcgcgatcagcgctgcgtcagccgcgaccttttcggccgctttctcgcggatcagtctttcgagatgatccaccagattgtcattcgtcaacttctgcgacggtttgccgtcgatgtagatcaggttcggtgtaccgccggtcaaaccgatgtgcgcctctttggcttctcccggcccgttgaccacacaaccaattaccgcgacatccagcggcaccagcaggtcttcgaggcgcccttccagctcgttcatggttttcaccacgtcgaagttctgccgcgagcagctcggacaggcaatgaaattgatgcctcgggaacgcaaatgcagggatttgaggatgtcgtaaccgaccttcacttcctctaccgggtctgccgccagggagatgcggatagtatcgccaatcccttcggcgagcagcataccgagacccaccgcagatttcactgtgcctgaacgtaaaccgcctgcttcagtgatacccaggtgcaacggctgtacgatttccttggccagcaggcggtaggcttctaccgccatgaacacgtcggaggcctttacgctgaccttgaagtcctggaaattcaggcgttcaaggtgctcaacgtggcgcagcgccgattcgaccagcgccgccggggtcggctcgccgtatttcttttgcaggtctttttccagggagccggcgttgacgccgatacggatcggaataccacggtcgcgagcagcatccaccacggcacgcacacggtcttcgcgaccaatgttgcccgggttgatacgcaggcagtccacacccagctcggcgacgcgcaatgcgatcttgtagtcgaagtgaatgtcggcaaccaacggcaccttgaccagttgcttgatgcgaccaaaggcctcggcagcgtccatgtccggtacggagacgcgcacgatgtccacgccagcggcttccagacggttgatctgggcaacggtggcggccacgtcattggtgtcgctgttggtcatgctctgtacggcgatgggggcatcgccacccaccggcaccgagccgacccagattttgcgcgatacgcgacgtttgattggagattcgccgtgcatgactattgtcccaacttcaggcgagcggtctcgccggtggtgaacggcgctacgtctacaggctggccgttgtaggccacttgcgcgccacgggcaaagcccagacgcagcgtcaaaggaggcttgccgccttggtcgagcgtatctcccttacgcttgagaccgctaaacagcactttgccattgccgtcggtgacttgcgtccagcagtcggcgacgaaggtaatctgtacgcggccatcaccggcgatcaacgctggggtggtaggtggcgaaatcgcaggagctgccggagcggttggcgctggagtcgctggcgcctgcactggagcggccggtgtatgggctatggcccccgaagcagccggcgtcgcgggaaccgttgcggcagcggtcgcggcaggcgcggtttccggtgctggcagctcagtagcggcggatgcttcaggcgcggcctggccttgggcgacagcctggtcttccggctcgtccagcggatgaatctgggtagtgccgtcggcgctttcgacttcgacgtgctccatggcgttgctggtcaggtccttggtgcgctgggaggtctggtcttgccaccagacaaaaccgccaccaatgacagcgatcagcagcaacaggctgacaattcgcaaaatcgtgtgggaaacccgcaccggttcttcgatgcgacccaagccatgcacattgctaccttgggagtcggtgccggtaaactggtcgaactcctggactagaacagtctggtcgatccccagcagcttggcataggcacggatatagccgcgggcgaaggtatgcccaggcaacttatcgaacgcgccagcttccaggttgcccagggatgtactggtcaaattgagcttgagggccacttccgccagcgaccaaccattgctttcgcgggcctgacgcaaggtgtcgcctgggtttacgcgattagctgctacaacttccgggtgcgccgctttcatcattgctccgacaggtattgctgatattccggcgtaccgggatagagtcgttcgagttgctggccaaaacgtgcagccgtgtcgcgttcttcatgaaccgtcgccagccgcacaccgagcaatagactacgtgcattttgcccgctgagcaggctaaaacgctcgtaatagtcacgtgccggcacataatgcctgtcatcaaaggatatctcagccatttcgagcaatgcccgaggctggcgaccattcaagtgcagggctttttccagttgccggcgggcattgtcgcgctggccgaggcggatcgaggtgaccccgaggttctcgaacacccgcgaacgctcaggatagagggtatcggcgctggcctgctggaaataaagagcggcctggtcataacgcttctgcgcaaacaggaaactgccgtagttgttcagcagccgcgggtcggcagggcgtgcggccagggccttgtggaaataccggtccgccagttcaggctcggcctgggcctggaacaccagggccagtgcggcattggcgtcggcatcgtcgctgtccagctcaagcgccttcttcaacggcaccttggcctgctcgttcatcccttgctgaaggtaacccaagcccagttgcacataggcaactcgcgcctcatcacggcctttaccggtttgcatagggctgtcatggcccgatgaaacacaaccagccgacaggccggtaacaagcagaagcagcgcaaggcgcaagggcatagagatcctctctcagattcgattcacagcgatcagcggtaaatcgtcggcggcgttcacttcacgtccggcgatataacgctcgctgcggcgggtgcggtccatcacctgcccgaccaattggccacaggcggcgtcaatgtcttcaccacgggtggtgcggacggtgacgttgtagccagcctggtgcagttgatcctggaaacggcggatggcgttgttgctcggtcgctcgtagccagaatgtggaaacgggttaaacggaatcaggttgatcttgcacggggtgttcttgagcaactcgatcatctcgaccgcgtgctcgaccttgtcattgatgtctttgagcaaggtgtactcgatggtcagcacgcgcttttcacccagggacgacatgtagcgctggcaagattcgagcagcatcttaagcggatacttcttgttgattggcaccaattggttacgcaatgcgtcattgggtgcgtgcagcgacaacgccagggagacgtcgatgtgcttggacagctcatcgatcatcggcaccacgccggaggtggacagggtcacacggcgcttggagatgccgtagcccaggtcgtccatcatcaggtgcatggccgaaaccacattgtcgaagttcagcagcggctcacccatgcccatcatcaccacgttggtgatggcacggtcgacggtcgccgggacgctgccaaaggatttgttggcaatccacacctggccgattacttcggcggcggtgaggttgctgttgaagccttgcttgccggtggagcagaaactgcagtccagggcacagcctgcctgggacgaaacgcacaaggtgccgcgtttgccctggggaatgtacacagtctcgacacagctgccggacgccacgcgcaccacccacttacgggtgccatcgctggagatgtcctcgctgaccacttcgggaccacgtacttcagcaatggccttgagcttgtcgcgcagggccttgctgacgttcgtcatggcgtcgaaatcatcgacgccaaagtggtgaatccatttcattacctgaccggcacggaaacgcttctccccgattgagtcgaagaatttctccatttccggctgggtcagccccagcaggttggtttttacagtcgatgtcgtcatggattcaccctcactctttaagccgatgcttagcgagcggttacttcagtagcggcgaagaagtacgagatttcgcgagcagcagcagcttcggagtccgaaccgtgtacagcgttggcgtcgatggactcggcgaagtcagcacggatggtgccggcagcggcttctttagggttggtagcgcccatcagctcacggttcagagcgatagcgttttcgccttccagaacctggacaacaacaggaccggagatcatgaaggcaaccaggtcgccgaagaagccacgagcgctgtgctcagcgtagaagccttcagcttcagccttggacagttgcttgagtttcgaagctacaaccttcaggccggctttttcgaaacgagtggtgatctcgccgatgacgttttttgcaacagcgtcaggcttgatgatggagaaagtacgttgaacagccatggtgtaactccagaaacggtaatttacgaaaaattaaacccgcgaattatacgcgggttattgggtattgcctaactgcgtaagggaggcgtcagtcctgttcttctttccaggcagtctggatagcctccaggaccttttcaccaccgcgatcacgctcatcttcgaaccctggcaacgccatgaccatgtcacgcaaagctacaaagttcagggagtaaggatccagatccgggttggcatctgccaacaggatagcgatctcttgcacatcaacccatttaagactcatgacacttccttgaatcaatgcggcgcttcggcagcatggttgagggaatacttcggaatttcgacagtgatgtcttccgtgccgacctttgcctgacagcttaggcgagaagtcgcttccaggccccaggcacgatcaagaaagtcctcttccagctcgtctgcttcttccagagtgttgaaaccctcgcggatgatgcaatgacaggtggtgcaggcgcagacaccgccgcaggcactttcgatctcgatgtggttgtcatgggcaacttcgaggatggacttgccggtctcagcctccacgaccataccgtccgggcaatgctcggcgtgtggcagaaaaatgacctgcggcattaattattcctcgatttcattcaggttgcgcccggccagtgcggctttcaccgtctgatccatgcggcgggcggcaaaggcatccgtcacttgcgacaggcgcttggtctgttgctcgatggcataaccgtcgttgcctttcatcagttcggccagttcctgcatctgcaggtcgatgaccatgcgctcttcggcatccagcaggcgctcgccgtcggcatccagcgcgccctgcaccgcttcgagcaggcgctgggcgtcgacttgctgctcacgcaatacacgggcgaccttgtcgtcaccggcatattggaacgagtccttgagcatcttggcgatttcaccgtcggtgaggccgtaggacggcttgacctggatgctggcttccacacccgaacccaactcgcgcgcggcgacgttgagcaggccatcggcgtcgacctgaaaggtcacgcgaatctttgctgcgcccgcgaccatggccgggataccgcgcaattcaaagcgcgccagggagcggcagtcgctgatcagctcgcgttcaccttgcagcacatggatcatcatggccgtctggccatctttgtaagtggtgaagtcctgggcgcgggcgacggggatggtggtgttgcgtggaatcaccttctccatcaggccccccatggtttccaggcccagggacagcgggataacgtcgagcagcagcaattcgccaccatcacgcttgttgccggccagggtatcagcctggatcgcggcgccgatggcgaccacctgatccgggtcgatttcagtcagcggctggcggccaaaagcttcggcgacggcttcacgcacgcgtggtacgcgggtggacccaccgaccatgaccacggcaccgacttcttccagctcgataccggaatcgcgcaccgcgcggcggcaggctttcaggctgcgggcaaccattggctcgatcaacgcatcgaaagcttcgcgggtcagttgggccgaccaggtgccgtaggaaacttcaacgcttgcagcattggtcagcgcttctttggccgcgcaggcggtttgcagcaggttgcgctgcgcgcccgggtccagatcggcagacaagccggcgctggtgatgatccagcccgcaatggcgtggtcgaagtcatcgccgcccagggcgctgtcgccgccggtggcgagcacttcgaagacgccgccggtcaggcgcaggatcgaaatatcaaaggtaccgccgcccaagtcgtaaatagcgacgaggccttctgcatgctggtccaggccataggccacggccgctgcggtcggctcgttgagcaggcgcaatacgttcagaccggcgagtttcgccgcgtccttggtggcctgacgctgagcgtcatcgaaataagccggaacggtgattacggcaccgaccagttcgccgcccagggttttctccgcgcgctggcgcagcaccttgaggatatcggccgacacttccaccgggcttttcgggccttggacagtgtcgatgaacggcatatgggattcgccgccaacaaagcggtacggcagctggtcgcccaattgcttgacgtcggacagaccacgacccatcaagcgcttgaccgacagtacggtattcaaagggtcggaagacgccgccagcttggccaactcaccgacttcgatgcggtcggcgtggtagcgaacggcagacggcagaatcacctggccatcagcgtccggcagcggctcggacaagccgctgcgcaaggcagcaaccagggaattggtggtgcccaggtcaatcccgaccgccaggcgacgctggtgcggttgagggctttggccgggttcggcgatttgcagtagggccatggtaatcaggtcttatctgtctatcaggcgtgcatcacgggcagcacactgggttaatcgtcgaggcgctcttctagctggcgcacttcgtaggtgagcttgtcgaggaactgcatgcgccgcatcaggcgttcggcctgctcacgttgcgctgcatcatcccaacaggctgcgaagctttcgttgagctcatcctgggcggttttcagacgacgcttgaagactgcaacaccagccagatcggcctcgtcctgcaagtcttcgagttcttcgcgccactgcatctgctgcatcaggaagtccggatcatgcacggtcacttccagcggcaactcgccaccgttcatcgcgagcaggtagcgcgcgcgtttcggggggcttctgagcgtctgataggcttcgttgaggctggccgattgctccagcgccagacgttgctcacgctcggaagcgtcagcgaagcggtccggatgcacgccacgcgccaattctcggtagcgcgtggcaagttgctcaaggtccagccgaaagctcggctgcagctcgaataaagcgaaatgacaaggagtacccacgaatagcctcagatgttgaagctttcgccgcagccacattcaccgcgtacgttggggttgttgaacttgaagccttcgttcaacccttccttgacgaaatcgagctcggtgccgtccaggtaggtcaggcttttagggtcgataatcactttttcgccgtgactttcgaacacctggtcttccgcaaccacctcgtcgacaaactccagcacgtaggcaaggccggaacagcccgtggtgcgaacacccagacgaatcccctcacctttaccgcgcccattcagggagcggcgaatgtgctgcgcagccgcttctgtcatgctgatagccatcattgactccttactcgtcgccaaatgcttagatcaagcctttcttctgcttgtagtcgcgaacggccgccttgatggcgtcttctgcgagtaccgagcagtggattttcacgggcggcagggccagttcttcggccagctgggtgttgctgatggtgacagcctcatccagggtcttgcctttcatccattcggtcgccagcgaactggaagcgatggccgaaccgcagccgtaggtcttgaacttggcgtcttcgataacgccagcgtcgttgaccttgatctgcaggcgcatcacatcgccgcacgccggagcgccgaccatgccggtgccgacatcagggtcttccgcgtccatcttgccgacgttgcgcgggttttcgtagtggtcgatgaccttttcgctgtaagccatggtactgaatcctcactcatcagggccgctctggaaccctgtagaaacgcctgcgttttccgccacgttcctacagagctggggtggcggcttctatagttagtgtgccgcccactcgatcttggaaatatcgacaccgtctttgtacatgtcccacagcggcgacaggacgcgcagcttgttgacggcttcgcagactttctgcgcggcgtagtcgacttgctcttcggtggtgaaacggccgaacgtaaagcggatcgagctgtgtgccagttcgtcgttgcggcccagtgcgcgcagtacgtacgaaggctcaagggacgccgaggtgcaggccgaaccggacgaaaccgccaggtccttgagcgccatgatcagcgactcgccttcgacatagttgaagctcaaattcaggttgtgcggtacacgggcggtcatgctgccgttgatgtacagctcttcaaggccttcgacctgcttgtagaagcggtcgctcagcgctttgatgcgcacgttttcggcagccatgtcttccttggccacgcggaaggcttcgcccatgccgacgatctggtgggtcgccaaggtacccgaacgcatgccgcgctcgtgaccgccgccgtgcatggtggcttcgatgcgcacacgtggcttgcggctcacgtacagggcgccaatgcctttagggccataggttttgtgggccgagaacgacatcaggtcgactttcagcttcgacaggtcgatgtcgaccttgccggtggactgggcagcgtcgacgtgcagcaggatgcccttggaacgggtcagctcgccgatggccgcgatgtcgttgatggtgccgatttcgttgttcacgtggatcacggaaaccaggatggtgtcttcacgcagcgcggcttcgatcatggccggggtgacgataccgtcggtggtcggctcgaggtaggtaacctcgaaaccttcacgctccagttggcgcatggtgtcgaggacagccttgtgctcaatcttggtggtgatcaggtgcttgcccttggtcgcgtagaaatgcgccgcacccttgatagccaggttgtcggactcggtggcaccggaggtccagacgatttcacgcggatctgcgccaaccaggtctgccacctggcgacgagcgttctcgaccgcttcctcggctttccagccgaatacgtgggaacgggaggccgggttgccgaagtttccgtcaaccagcaggcattcgctcatcttttgcgcgacacgcggatcaaccggggtggtcgctgagtaatcaaggtaaatcggcaatttcatggactttctcctaaatcaggctggctggcgtgccgttagctcttcggctgtcactcgacggcggacgcttcgatcttgtccagacgcggcgccttggtgttgcaacggcgctggtcctgacgctgggctacttcttgcacctcacggcgagtcacaagatcagccaagctgataccactcaaaaactcatggatctgcaggctcaagtcacaccacaagtggtgcgtgaggcaggtgtcgccggcgtggcaatcacccagcccctggcatttggtggcgtcgacggattcgttgaccgcgtcgatcacctgggcgacctgaatgccctgcatgtcacgggacaactgatagccaccacccggcccacgcacactggacaccaggttgctgcgacgcaatttggcgaacagttgctcgagataggacagggaaatgccttggcgctcagagatatcggccagggacaccggcccagtttgcgcgtgcaaagccaagtcgagcatggcggtcaccgcgtatcggccttttgtagtcagtctcatggacaagtaccaaggtgtttcagaatgggagcaagtatgcgattcccgagtatttaagtcaactataagacctagtactttagtcaggattacccgtaaaaagggcgcgcgaatcatagcaggatggggtggggacgaacagcgggaacagggccggatggagattgctggatcaacggaggtcaacatgtgggagggggcttgctacagatagcagtctgacagctgaagaatgcatcgactgacccactgtcatcgggggcaagccccctcccacatttgagctgcattggtcgcgaggcctcagccgaccttggtggcggcttcgtccttgatttcggcgaagtcttcttcgcgcaactcaggcagatccttggcgcaatacgggctacccagatccttcagcgcaccacacataccctccaacttgccgtccaccgcctgcagatggtcgagcaactggccgatagcgcgtgccaccgggtcgggcatatcttcgctgacaccgtaggcatcaaaaccgattttctcggccatggccttgcgcttggcctcctgctcgtcgccggcttccggcttgacgatgatccggcctggaataccgacaacggtcgcacctggaggcacagccttggtcacgacagcattggaaccgaccttggcacccgcgccgacagtgaaagggccgagcaccttggcgcccgcccccaccaccacgccatcacccagcgtggggtgccgcttgcctttgttccagctggtgccgcccagggtcacgccctgataaagggtgacgtcatcaccaatttcggcggtctcaccaatcacgatgcccatgccgtggtcgataaagaaacggcgcccgactttggcacccggatgaatctcgatcccggtcaaccagcgaccgaagttcgacaccagccgcgccagccatttccagcccatgccccacaaggtgccggacaggcgatggatccagatggcgtgcatgcccgggtagcaggtgagcacttcaaaggcattgcgcgccgccgggtcacggtggaaaacactctggatatcttctcgcaaacgctcgaacatttttaatccttccgtttaagaagctcgccacgggccgccttctgggtttccgtgaggatgccacgcaatatattcatttctgcccgactgaccgagctgcgtccgtaaaggcgacgcaggcgcgccatcaagtgccgtggtttttccggatcgaggaactcgatggccaccagggtttgctccaggtgttcatagaaccgttccagctcgtccatggtggccaactcgccacttttggtcgaggcaacctcttccttctctaccttgcttggctgaccagcagcggccagccaggccatgcgcacttcgtaagtcaacacctgcaccgctgccccgaggttcagcgagctgaattcagggtctgatgggatgtgcacgtggtaatgacatcgctgcagctcttcattggtgaggccggagtcttcgcgaccaaacaccaaggcgatttcagcgccaccggcggcctcttccaccaccttggtgccgcactcacgcggatccagcaatggccaggggatgcgacggtcgcgggcactggtgccgagcaccaggctgcagccgaccaaagcgtcttccaaggtggcgacgacctgggctttttcaagcaggtcattggcaccggatgcgcgggcatcggcctcgtgatgcgggaacacgcgtggttcgaccagcaccaggcgcgtcagccccatgtttttcatggctcgcgccaccccgccgatgttgccggggtgactggtattgaccaagacgacacgaatgttttgcagcaagggaggcgctctcggacacgggaaaggggagcaaatcttacagaacagcctaaggttatgccatgaaagctaacgtcgtccttcacctgaagaaagtttctgctagaatgctcggctttctttaacaaccttaggtgacacatccatgcagcccatgctgaatatcgcgctgcgcgccgcccgcagcgccagtgaattgatcttccgctccatcgagcgcctggataccatcaaggtcgacgaaaaagacgccaaggattacgtatccgaggtggatcgcgccgccgaacagaaaattatcgacgccctgcgcaaggcctaccctacccacggcatcctcggtgaagaaaccggcctgcacaaaggcagcggtgaaggcgaagactacctgtggatcatcgacccactggatggcaccaccaacttcctgcgcggtatcccgcactttgccgtgagcatcgcatgcaaataccgtggccgcctggaacacgccgttgttctggacccggtccgccaggaagaattcaccgccagccgtggccgtggcgcccaattgaacggtcgtcgcctgcgtgtcagcggtcgtaccagcctggacggcgccctgctgggtactggcttcccgttccgtgacgaccagatggacaacctggaaaactacctgggcatgttccgcgccttggttggccagaccgccggcatccgtcgcgctggcgcagcaagcctggacctggcctacgtggccgccggtcgttttgatgcgttctgggagtcgggcctgtccgagtgggacatggcggcaggcgccctactgatccaggaagcgggcggcttggtgagcgacttcaccggcggccacgacttccttgagaaaggccacgtggttgccggcaacaccaagtgcttcaaggcagtactgacggccatccagccgcacctgccggcttcgctgaagcgttaagcgagcgagcacaaaaaagcaccccgaggggtgctttttttatgcctgggatttgaggtttgccgcaactccagcaacaacacaaatcaattgtgggagggggcttgcccccgattgcagtgggtcagcacctaacaagctgactgatccaccgctatcgggggcaagccccctcccacattttgaactcacataattttttgcatctgtaccaggcttgagattactgctggttctggcccagcaccaagcggccttccttgtcgaccggaatctggccgcctggatcacggtccatacgcaccgagccttccttgccatccaaggtgtaacgcacgtcataaccgacaaccttgtcgctgatgtcgttgacggtgttacaacgggtttgcgtggtggtgtaggtatcgcggttctgcataccttcctgaaccttgttaccggcataaccgccaccgaccgcaccggctacggtagccagcttcttaccgttaccgccaccgacctggttacccaataggccaccggccagtgcaccgaccaccgtaccgacgatctggtgctgatcctgcacgggcttctgccgagtcacggcgacgtccttgcagacctcacgcggcgttttaatctgggttttcaccggctgcactgccagcacttgcgcatactcagggccgctttttaccaggctgtaggtggcaacagcacccccggcagtcacaccgacagcacccaataccgcaccaaccagtaacgacttgttcacatgaacctcctgaccatcacaaacggatcgaaagatccgcgctatacccagccttggagcaaaaaaaaaggcacgagttcaatactcgtgccttctttgtaacagcggatcaacaagcgcccatcaagggcggtcgtcaacctccttgccagtagccgcaggagggatcagatcttcgctgttgaggttcagccagatcagcaccacgttggcgatatagatcgacgagtaggtacccgccagcacgccgatgaacaacgccagggagaaaccccacaggttgtcgccgccgaagatcatcagcgccgcaatcgccagcaacgtggagatcgacgtcgccatggtgcgcagcagggtctgggtggtggagatgttgatgttctcgatcagcgaggccttgcgcagtacacggaagttctcgcgaacccggtcgaataccacgatggtgtcgttgagcgagtaaccaatgatcgccagcacagccgccagcacggtcaggtcgaaggtcacctggaagtacgccaggatacccacggtcacgatcacgtcgtggatcagcgacacgatcgcgccaacaccgaacttccactgaaagcggaacgccaggtagatcatgatgccgaccagcgccatcagcatgccgaggccgccctggtcgcgcagttcttcacccacttgcgggccgacgaactcgacgcgcttgaccgacgccgggttgtcgccgccgaccttctgcaaggcctcggccacctggtgacccagttgcgggtcttcgcccggcatacgcaccagcaggtcggtggtcgcaccgaagctctgcacgatggcttcgtgatagccggccttgaccagctcgttgcgcaccagggtaacgtcggcaggcttctcgtaggtcagctcgatgagcgtaccgccggtaaagtccagaccgtagttcaggcccttatggaaccagctgaacaacgccagaacggtaaggagcacggtgacgccgaacgcaatgttgcgaacgcccatgaagttgattgtacgtaacatggcagccccttaaatccacaacttcttgaagtcacgcccgccaaagatcaggttgaccattgcgcgggtcaccatgatggccgtgaacatcgaggtaaagatacccagggacatggtcaccgcaaaacctttgacggggcctgtgcccatggcaaagagaatcccgccgaccagcaaggtggtcaggttggagtcgagaatcgcagtaaatgcccggccgaagccttcgttgattgcacgctgtacggtcatgcccgccgcgatctcttcacggatccgcgagaagatcagtacgttggcgtctaccgccatacccatggtaagcacgataccagcgatacctggcagggtcagtgtagcgcccagcagcgacatcagggccagcagcatcaccatgttgcccgccagggccacggtggcgatgatgccgaagaagcggtagatggcgatgatgaacagcgacacgaacaacatgccccacaaagcagcgtcgatacccttggtgatgttgtcggcacccaggctcgggccgatggtacgttcttcagcgaagtacatcggtgcggccaggccaccggcacgcagcagcagggccagctccgaggattcgccctggccgttcaggccagtgatgcggaattgagcacccagcggcgactggatggtcgccaggctgatgatcttcttctcttccttgaaggtctggaccggtacgtccttctcgacgccgtcgaccatctgcttggtgtaagtggtgacagggcgctgctcgatgaagatcaccgccatgctgcgaccaacgttgctgcgcgtggcgcggctcatcaggtcgccaccgtggccatccaggcggatgttcacttcaggcgtaccgtgctgcgagtcaaaaccggctttggcatcggtgacctggtcaccggtgatgatcaagccacgctcgatcagtgcaggaggacgattgccttcgcggaactcgaactcctcggcagtggcgcgggtagcacccggctcggccgccagacggaattccaggttggccgtcttgcccaggatacgcttggcttcagccgtgtcctgcacgcccggcagctcaaccacgatgcggttggcgccctggcgctggacgatcggctcggctacacccagctcgttgacgcggttacgcaccgtggtcaagttctgcttgatggagtattcacggatttccgcgatcttggccggcgtcatcgccaggcgcagtacaggctgaccattgaggtcggccggtacgatgtcgaaatcgttgaagttcttgcggaccagcgcacgggcctgttcgcgggacgcttcgtcagagaaacccaactggatggcaccgttgaactgcggcaggctgcgatagcgcagcttctctttgcgcagcaggctcttcacgtcgccttcgtagactttcaggcgagcgtcgagggctttgtccatgtcgacttccagcaggaagtgcacaccaccggacaagtccaggcccagcttcatcgggtgcgcgccaatgctgcgcagccattgtggcgtggtctgtgccaggttgagcgcgactacatagtcatcacccatggccttgcgtacgacgtccttggccggcaattggtcttctgccttggtcaggcgcaacaagccgcctttggcacccgccgccaatgttgccgccttgacctggatccccgcatcagtgagcgctttgctcgcacggtccagatcggcctgattgacctgcagcgaagtgctggcgccagtgatctggatcgccgggtcatcaggataaagattgggagcggaataaataaaaccgatcgccagcaccgccaggatcagtacgtatttccacagagggtatttgttcagcatcacgccgcccgcttataacgcggggcgccttgcgcgccccgtcgattggtaaaggttgttactcagatcgctttgagcgtgccttttggcagcgtggcggcgatggcgcccttctggaacttcatttctacggtgtcggagacttccaggaccacgaaagcatcggaaaccttggtgatcttgccggcgataccgccagtagtcaccacttcgtcgcctttttgcaggctgccgagcaggtttttctgctctttggcgcgcttggcctgtggacgccagatcatcaggtagaagatgaccaggaagccgaccagaaaaatccactcgaaaccaccgcccataggaccggcagcggcaggcgcagcggcatcagccatggcgttagagataaaaaagctcatttagcactccagttgcaaatagtgaatcttagggtcggaaaactcagtccaagggcggcacagggagcccgcgcttggcatagaaggcatcgacgaaggcggccaatgtaccctgttgaatagcctcgcgcaaaccagccatcaggacttggtagtgacgcaaattgtggatggtattcaacatgctacccagcatttccccgcacttgtccagatggtgcagataagcacgggagaagttctggcaggtgtagcagtcacaggtgggatccagcggcgaatcatcatggcgatggaacgcgttacggatcttcagcacgcctgtatcgatgaacagatgcccattgcgggcattacgggttggcatcacgcaatcgaacatgtccacaccgcggcgcacaccctctacgagatcttccggtttgccaacgcccataaggtaacgaggtttgtcagccggcatcaggcccggcaggtaatccagcaccttgatcatctcgtgcttgggctcgcccaccgacagaccgccgatggccaggccgtcaaaaccgatcttgtcgagaccttcgagcgagcgtttgcgcaggctttcatgcataccgccctggacgatgccgaacagcgctgcggtgttgtcgccatgggcgttcttcgaacgctgtgcccaacgcagggacaattccatggagatacgcgcgacgtcctcgtcagccgggtacggcgtgcactcgtcgaaaatcatcacgatgtcggagccgaggtcgcgctgcacctgcatcgactcttccgggcccatgaacaccttggaaccgtccaccggcgaggcgaaggtcacgccctcttccttgatcttgcgcatggcacccaggctgaacacctggaaaccacccgagtcggtcaggatcgggccttgccacttcatgaagtcatgcaggtcgccgtgcttcttgatcacttccgtgcccgggcgcagccacaggtggaaggtgttgccgaggatgatctcagcgccggtggcgacgatgtcacgcggcagcatgccttttacggtgccgtaagtgcccacgggcatgaaggccggggtctcgacggtgccgcgcgggaaggtcaggcgaccacgacgggctttaccgtcggtggcgagcaattcaaacgacatacgactcatagttgttcctctgggccgcgtggcgccgggttacgggtgataaacatcgcatcaccgtagctgaaaaaacggtatccattggcgatggcggcttgatatgcggccatggtctcgggataaccggcaaatgccgacaccagcatcaacagcgtggattccggcaaatggaagttggtgaccaggcaatcgaccacatggaacggccggcctgggtagataaagatgtcagtgtcgccactgaacggcttgagcacgccatcacgcgccgcactctccagcgagcgcacgctggtggtgcccaccgcgatcacccgcccgccccgcgccttgcacgaagccacggcatccacgacgtcctggctgacttccagccattcgctgtgcatatggtggtcttcgatgttatccacacgcaccggctgaaacgtcccggcccccacgtgcagggtcacataggcggtctcgacgcccttggccgcaatcgcatccagcagcggctggtcgaaatgcagcccggcagtcggtgcagcgacggcgcccaggcgctgggagtacaccgtctgatagcgctcgcggtccgagtcttcgtcggggcggtctatataaggaggcaacggcatatggccgacacgctccagcagcggcaacacttcttcggcaaatttgagctcgaacagcgcatcatggcgcgccaccatctcggcttcgccaccgccatcaatgaggatgctcgaccccggtttcggcgacttgctggagcgcacatgggccagcacgcgatggctgtccagcacccgctccaccagaatctccagcttgccgccggaggctttctggccaaacagccgcgccggaatcacccgggtattgttgaacaccatcagatcgcctgggcgcaaatgctcaagcaaatcagtgaattgacggtgtgcgagggcaccgctcaccccgtccagggtcagcagtcgactggcgcgacgctcggccaaagggtggcgagcgatcagcgaatcagggagctcaaaagtaaagtcagcaacgcgcatgatggggttcgtctagcagggccgggaagtctagcggaaatagtcaaaattgaccatgaaacgtgattgaccaacggtaatcacctctctatacttcgccgccattgagccctgatggcggaattggtagacgcggcggattcaaaatccgttttcgaaaggagtgggagttcgagtctccctcggggcaccatcttaaaaaaagaccttgaaattcaaggtcttttttttcgtctgcagaaaagtggtttgtccacgcaaccactacacacccacccctcccccctcacttatgcaagatcgcccgataaatatcctccagcgccatgatgcgctgagcggcgttgagtttgatggcttccttgggcatgccgaacaccacgcaactggcttcatcctgggcgactgtcgcggccccggcctcaagcatttccttgagcccgcgcgcgccgtcgtcgcccatgccggtcatgatgattccggtggcattcctgccggcgtagcgggccaccgagcgaaatagcacatccacggagggtcgatggcggttgaccagcggtccatcgatcacctgagcgtggtaataggcgccgctgcggttgaccatcaggtgcttgccgccgggtgcgatcagggccaggccaggcaggatacggtcgttgttgcgcgcttcgcgcacctcgatttcgcacacgctgttgaggcgctcggcgaacgaagcggtgaacttctcgggcatgtgctgcacgatcaccatacccgggcatacgcgcggcagtgccgtcagcacggcttccagcgcttgggtgccgccggtggaggtgccgatggcgacgatgcgctcggtggtctgggccatggcatggccattggcggcgggcaggatcgcatcggcagtgagcttgctggccggaaccagtggtgggctgacgctgcgctttcccaggttcctgacgttggagtttgcggcggcccggatcgcggccaccaactcggccgccgactcaatcaggaaactcttcaggccggttgagggcttggtgatgatttccacagcgcccgccgacagcgcctgcagggaggtttccgcgcctttctgggtcagcgaggagcagatcaccaccggcgtcggccgctcgctcatgattttcttgagaaacgtgatgccgtccatgcgcggcatttcgacatccagcacgatcacgtccggccattcccgcgccagtttgtccatggcgaaaatcgggtcggaagccgcccccatgacgtggatatccggcgtatcgctgagaatcgccagcagtacctggcgcaccacggccgaatcatcgaccagcagcacactgatttttttggtaggcatcttcttgaagtattcccattggttggtgccgaacccagacgttgccgttccacaggtcgaacatgatcgtgcggtaaccggtactgcccatgtcctgggcggtcaggtgcaggtgatgacgctcggccagggccagcgccgcgcgaatattcaggctggccacgtcctgcgtcggcaggcggcgttgcagatcaggaaacatctcgccgccaccgaacaacttgacctggtaatcccgtgcatgcgtgccattgatttgcgcgtggcgcagcagcagttccagtgcttcgtcggcataccggccatcgaggggctgatggttgcgcaggcgccccggcagcatgaagtgacacatgccgccgatcagccgctgcggatgccaaaaggtgatcgccacgcatgagccgagcaaggtccgcaggcgcgtcggccgcgttgcaaaactgacttggccaggcgccaataccacttcggtcgtacccacgggctttttcatggcttgcggtaaatcgacggcgccaccagcttcaaggtgtcattgacgccgtggaggctttcggagtgactgatgatcaaataaccgccgcgtttaagcagcggcaacagacgcgcgaccacctggctcttggtctgctgatcgaaataaatcatcacgttgcgcaggaaaatcacctcaaactcccccagcgccggcagcgcttcgttaaggttgacctggataaagttgacgcggttgcgcaaggtcttgtcgatcaggacggtgccctcctgacgtcccatgcccttgaggcagtacttgaccagcagcggctggggcaatgtctcaatgcgttccattgagtaatgccctgtgcgcgccttggccagtacctgggagctgatgtccgagccgatcacttcccagggcgtggtgccgaggctttcggccagggtcatcgccaggctgtagggctcttcgccggtggaactcgccgcgctccacacgcgaaacatccggcccggcgcggcctggggcaacacgtgctgacgcaggaagtcgaagtgcttgggctcgcgaaaaaaataggtttcgttggtggtcagcaaatccagcgcaacctgcagttcgcccttgcgctggtcattcatgatcagcttgaaatactcaccatagctctgcagctcatagtgcttgaggcgcttgaacaggcgcccggccaccagggctttcttggcgggcgacaggttgatgccggccgcccggtacagccaggtctggaactgaccgaattcacggtcgtcgatggagacggtgtctgacatgatcgagcctcaacgcaggtcgaggtcaggggccggcgcctggccggcctcggccaggctggacatctcgtcgatggacagcaccttgtccacttccagcacgatcacgaatttgccctcgaccttggccatgccactgatgaaatcggcgcgaatgcgcgcaccgaaactcggtggcggttcgatctgcgtggccgggatctcctgcacggcagataccgtatcgaccagcagcccgatgtcctgtggctgaccgtcctcggtactcgcctcgatgatgatcacgcaggaacgccgagtgatcgccgagttggcccgcccaaagcgcgccgacaagtccaccaccggcaccaccgcgccgcgcaggttgatcaccccgcgcacaaaagcgggcatcatcggcaccacggtcaggctgccgtattcgataatttccttgatccccaggatgccgatggcgaacatttcgccgcccagcatgaaggtcaggtactgcgcatcctcatcgaccgccaccgcagtctgccgagtcgtcattactgcacccatgtcactactctcccttgtaggcgcgcatcgatcgtgcgatcagaagcgggtgaaatccgattcgtccggggcactggccatggtgtaggcgaacgccttgcgcggcgccgttggtttagggcgtggcggctgacggttgggcgtgctgccagggctgtccgcgccggcgctttgaccagcagccttggacgctgaatccagcacgaagaaactcatggcctgttgcagttgctcggcctggctgctcatttcttcggccgtggccgccagttcctcactgctcgaggcgttttgctgggtcacttggttgagctgggtcatcgccgtgttgatctgcgctacgccagcggcctgttcttcggacgccgcgctgatttcctgcaccaggtcggacgtcttgttgatggaaggcaccatttcgtcgagcaacttgccggctttctcggccatctccacgctgctggaagacagttcgccgatttcctgggcggcgacctggctgcgttcggccagcttgcgcacttcggcggccaccacggcgaaacccttgccgtgctcgccggcccgagcggcctcgatggcggcattaagcgcgagcagattggtctggtaggcgatgtcatcgatgatgctgatgcgctgggcgattttcttcatcgccaccaccgtctgctgtaccgattcgccgccctcggtggcttccttggccgctttgctggccatgccgtccgtgaccttggcgttttcggtgttttgattgatgctggcgctcatctgctcgaccgacgcactggtttcctcgacactggctgcctgttcactggtggcctggctcatcgattgcgcggtggcgctaacctgttcggaggcgctggcgaggttatcggaggcgttacgcacttcgccgatgatatgggccagcttgccgaccatgttgcgcatggcgttgagcaccatgccggtttcatctttgccacctggctcgatgtgcgcattaaggttgccttcggccaattgctcggcggcgctcgccgcctggcgcaacggccgggaaatgatccgcgcgatgaatatcgccaggcccagaccgatcagcagggatgcggccagtaccgcgatgatcgacacgcgtgagctttcatacagcgccgagcccttgtcacccgcggcagtggcgccggcgtcattgagctcgaccattttctgcaggcggctggtcacctcatcgaaatgccctttggattcaccccggagcaaactgcgcgcctgggcttcctggttctgacgggaaaactccagaacctgcttgctgctcgcaatgtaggcgtcccatgcgcttttcacgctgagcaggagttgacgatcttcatcgttcgacagcaattgctcgtaggtctgcatgcgggtttcgaactcctggcgcgcttcggtggcttcgcgttcggcctgggccttttcttcgggaatctcggtaccgatgtggcggttttctttcaagcgatagttggcggcaaaaaaacgcatgcctgaggctgcacgcatggagggcatccagttgcccttgatgtcctgggcggcctggttgacggcaccgagctgaaggatagcgaaggcgcccatggccccggtgagggccaggaccaccaggaacgagctgatcagcttggtggaaattttaagatcgtagaaccatttcatcggggaacctccatggaattgcaaagacgtcagcgggcgacgagcggtggcgactgaggcgcctgggccgtgcgggcttccagttgtacgatttgattgagtagcgccggtacatccaggatcaaggccaccgcgccgctgcccagaatggtcgagccactgataccgcgcagtgcgccgaacaacttgcccagtggcttgatcaccgtctggaactcgccgtgcaggtcatcgaccaccagcccggccttgtgctcggcatagcgcaccaccaccacgttttgacggcgggcggccgggccttcgtggctgaagtggtcgcgcaggtccaccaggggcagcacctcgccacgcaggtccagatagccctgatcgcggctcgactggcgctggcgttcatccagctcgacgcattcctggaccatgtccagcggaatcacgtaggtggattggtcgacgccgaccaggaagccattgatgatcgccagggtcagcggcaagcgaatgcgcaccaccgtgccctggcctgggcggctgtcgaggtccacggtgccgcgcaacagcgtgatattgcgcttgaccacgtccatgccgacgccacgcccggacaggttggtgacggcctcggcggtagagaagcccgcctcgaagatcaggttgtagacctcctggtcggagagcaccgcgccgctggccaccagcccgcgttcctgggctttttccagaatgcggtcgcggttgagcccggcgccgtcatcggcgatttcgatgacgatgcttccggagtcgtggtaggcattcaggctcagatggcccttgctcgacttgcccgccgcacgtcgcgcatcggcgctttcgataccgtggtccatggcgttgcgcagcaggtgcatcagcgggtcgccgatcttctcgaccacggtcttgtccagctcggtctccgcgccgctgatgatcagctcgatgtccttgcccagttcctggctgacatcgcgcaccacgcgacggaagcggttgaacgtgtcgccgatggggatcatgcgcaggtgcagggcaccatcgagaatctcttctaccagcccggacaccgtcgaggtggcctcttgcagcgggtcgttgttacaggagcgcgccaacaggctggcgccggcgctggcgatcaccaattcgccgaccaggttgatcaactcatcgagcttgtcggcgttgacccgaacataactgccgtcgcgggttttcgcctcgctgttcgctggctggcgctggggcgacgcgggggccaggcctggctcggcttgcgcgatcaggtcactgccgatggcgacgctgcttgcgggcgtttcgtcgacggcgcggatgtgcacgtcacagtcgtcgcgcacgaagtcgaacacttcgttgagcgtggcatggctggccgtcgaacgcaggtcgatctcaaagcccaggtagcagctttccgggtcccagtgctccagggcggggatgctgtcggtcagggtggtgacctgcaccatttgccccagcgtatcgaggtagcgcaggaacgacagcgggtccatgccattacggaacacgtccacgccgaaacgcagagaaatatgccaaagcacgtcggcccccgtgtcgtcgtgcaccgcagcgggtacgacgtcggcggtggcgctgcgcagcggctggtagtcgctcagcgcctcgcgcaaggtctcaccgcgctccagcgtggccggggtcggcgtctcaccgcgactggcgaccacgtcgatcagttcaagcatgtggtcgccgcacttgagcagcagcgcaatcaacgccgcgtccaccgccacactgccatcgcgcaggcggtcgagaacgtcttcgacgatatgcgtgaaccccacgatcgacgcgaggccgaacagtccggcggatcccttgatagtatgcgcggcgcggaaaatcgcgccgatggcatcctggtcgccggggtcgctttccaattgcagcagggattgctccatggcctgcagtagctcgcgcgcctcgacgatgaaggtctgcagtgcctgatcgagattgatgctcacctggactttccttgtcgatcaatgaacgggacagtgccgcttaaagagcggcgctgcgacacagttggagcgcctgcatgactgcctggctctggccggtcacactcaaggcggtgccggcaatgccggcttcacgctggatgacggccagcaactgcaggccggcaccgtccatttccgtcacctgggacaggtccagttccaggcgcggcgccgcgcccatctgcggccacaacgcgcccgccagttcagcgacggtgtagatcgtgagttcgccgtcgatgcccacatgggtagtgtcgtcgattgtttcgtgagtgatcggcatgttggcctccctggcgccgggtgtcagggcaggatcaatttggagaccgccgccagcatctgcgccggctggaacggcttgaccacccacgccttggcgcccgcggcctggccttcggccttcttcgattcctgagactcggtggtcagcatgatgatcggtgtgaacttgtagttggccagcttcttcacctccttgacgaaggtgatgccatccatgttgggcatgttcacgtcgctgatgatcaggtgcactttttgcccggtcagcttgttcagggcgtccttgccgtcgctggcctcgatcacgtcgtaaccggcgcttttcaaggcgatgccgaccacttggcgcacgctgctggagtcgtcgaccactaatacattcttcgccatgatgtgctcctaaaagaaagtgatgtcttgggaattcgactgcactgccgcctcgccacgatggaggcgtcgttgctcgtcagtggcataggtggtttccatgcgcgccagccactggcgagcgtcgatgtccagcggctggtccggggtctggttggcctgttgcagatggtcatgcagggcgtgcatgttgtcgcgcacgtgactgaggatctggctgacccggtcctggaattgcaggttgaccaacacctcggtcatctcatcgcggatgccgtagctttcctgtttgagcaggtcggcggattcggccagacgcccagtgatgttctggaagcgtgtgagcaccatttgaatactgttttcggactcggccaccgaatggctgtcctggtcggcactgctggacgcggcctgcaccaattgagtaatggcgttattgatgatgtcgaccttggccgacatctgctggcccgtttcactggatttgctcgacaggctgcgcaccgcatcggccaccaccgcgaagccgcgaccggcctcaccggcgcgcgccgcttcgatggccgcgttgagggccagcaggttggtttgtgcggcaatcgctgccacatcagcggccatggtacgcagttcgcccgtataggcggtcaagctgcgcacctgcgccagggtctggtcacggctggtttgcgtggccttgagcgaattgatcacctggctcaactcgctgtcactgcgtgccagcacctcaagcgcgccgtcagcggcctgcccgtccagctcgccggccgcgtgctgcgacgcttgtaccgtttcctccaagcgggtggcgatcccggtgaaacggttcaccaggctcacaatcgcttcctcggtctgatggcgcgagctttccacctgcttggcccagatgggcatggcacccagcaatacctcatcgagctgtgcacgcgaggccaagccgttatgcgcgtgcgcactcgactggtccgcctgcgcctgcgcaatcgctcgctgcagcgcgttgcgctgcgaagccgcgctccaggcacaggcaccgaggccgatcatcaccagtaccgtgcaggccagcagattggccggcgaagtggattgcacgagtatccacacaacggccggcacgaccggaatcaaggcgaaccaacggaaacgaggataaacgggaaggtgcgtgcggctggatgggcgctggggcatgagttcgatccttgaacagtgttgcggatgtaaacgacatagaggctatccgcccctagcggctcaactttaggtctgttgagtaccttccgtctggtttatgaccggtgtgtgactgagcacggagttaagtgtaggtgacgcccgctgacacgcttaggctgcttgcaggatcgtacaagcgccctcgatccctcgttcgctaacctgacgactcttatccagcagagtctccgacatgtctcagtcacagcccccgacacaccccataaatctcatccaaaaagctgacctgatcgaccaaccatggagcccacgcgtcgttgcggagatgaacgactaccagttcaaagtcgtgcgcatcgaaggcgagttcatctggcactcccacccggaaaccgacgaggcctttctggtactcgacggtaccctgcgtatcgaccttgcagacggcccggtctatgtcgcaccgggcgagctgtacgtggtccctcggggcgtagcgcaccgcacagccgccgaaggcgaggccaagctgatgatgatcgagccacggggcatcttgaataccgggcatgaaggtggggagcttacggctgtgaatgaccagtggatctgaggctggcgtcgcctgctcgctcatactgttatgagacactcactccacttatcgtgtcagccttgaacaggtcaagacgcggccgccccggacgagcggccggtagggttatttcagcaaggcaatcagcgtgcagaccaccgtgatcgccagcgccggccattgcatcggcatgaaaaagaagtggtggcgcacgccatcggcgtgcggttgtcggttcagtacaaagcccagcacggtgttgatcgctgaccccgccccgaagccgagcaacacctgcatcagggatgtgttgccgggtttgacgctggggtcgggccacagccacattaatagcagcaccatcgccaccggtgtaaacaacgtcagccagcctgcgccgcgatagatcatcgattaatcctcacaacttgcgagtctgtgggggcctgggtgggaagtgagtgcatgcgtttttccgtccttgtaatgggtcaagccttgcaccgcccccgtctggtggccgagtgcatttggcacggcgagttggaacatggctaattaatattgttccttgggcaaatgacttcacaggggcgtgagcctggcagttcgcggtattggggtcttttttttcctgcgtagaacagtgatcatcgccctcccccaagccctaggaaccaagaccatggagttgacgctggaagctgttgcgctttttgcactgaagctggtgcacgagacggacggcggcagcccggtcttgcgggacgatccggtgatggatgggtatgagcgggaggtattcgggctgctggtgcggcagggagacttggcggccattcaatccaaagtcgcggaatgtgtggatcaagcgcttgaagcactgggcggggccgatacggtgatggggcgcgagttgcagcgcttggcgctgggcgtgcgccaagcgtcgacactggatgaactcaatgccccgctcaacgcactcaaggattacctgaaagccattctgtaacgcgcggttcagcgccgcccttccaccgccatccgcaccgccaaccccatcaacaccgagcccatcaaccagcgctgcaccacctgccaacccggccgggtaacgaaaaataccgcgatggaacccgccagggtggcaatcaccgcgttgacactcacgctgataaaaatctgcgtaaagcccagcaccagggattgcgtcaacacgctgccatgaccgttcgggtcgatgaactgcggcagcagcgacaaatacatcaccgctaccttggggttgagcaggttggtcaccaggcccatggtgaacagcttgcgcgggctgtccttgggcaagtcccgcacctggaacggcgaacgcccacccggccggatcgcctgccaggccatgtacgccaggtacagcgcgccgccgaaacgcagcgcgtcataggcaaacggcaccgccatgaccaaggccgtgatccccaaagccgcgcacagcatataaaccaggaaacccaaagccacgccccccagggaaatcaacccggccgtgcggccttggcagatcgaacgggagatgaggtagatcatgttcgggccgggcgtgagcaccatgccgagtgaaatcagcgcataagccagccaactggacagttcgggcattgttgggctcctggggtgttaggttgtcagcgaaatatttggtcaaggttgtcggcttggccgccatggtagggcgttcaaaatgcgcgcgttagatacagatccgcgagcaaaacggcatacacccaagaggcaggacatgatcgacttcaacaacaaaggcttcttcaagctcaagcaaaacaacgaatacgccgaacgcgtcgtcgccctgctgctggacggcgaagaagtgatcgacgcttacaaggccatgcgcgacggcgtggtgttcaccaccaagcgcatcatcgcggtgaacgtgcaggggattaccggcagcaagaaggatttcacttcgctgccgtataaaaatatcgtggcgtattcggtggagacgtccgggacgtttgacctggattcggagttggagatttatttttcgtcgctgggcaaagtgaaattcgaatttaccggcaagacctcgattgtggaaatctcgcggttgatttccaagcacctgctggcctgatcggcaggcaattgatttagacggcggtcccccaatcaaaatgtgggagggggcttgcccccgatagggccccctcccacaccatcaaaccacagccctacacaccaacgccttccccttcctccaccgccccattcggcaacatcccattcgccaaatcatccaccactgccttggccatctcccccaaataatgcgccgcccaggcatagcgatctgcactggaatccatggctgcatccaacgccagcaacttggaacagtgcaacagctcggaggcatgctccagggcatcacggatgggcacgccggaattgacgcggaatagacggtggaggttcggctgcttgccgcaggtggagaaggtgatgatgccgagggtgttgttgaggggtgggttgatcattgggcacctccagagtggttggagatgcttacgatggtattgcgtgggtacgacctgtcagaaacgctcattggcttaactcctaatgtagataagagccgccacgttcgtttccaggcgagtgggtggcagctatgcgcaggctggaaaaccgggacaataggaacccggcagacccgaaggtctcccgcgcacagccgccataacacgaatatgctggcacaaaaacaccagcaatcgtgataaatagtggcacctgtgcgctattgttccacgggtttccaggcccgatcgccgaatgtcgacgacacgccaaaagtagcctaaagactgattagcggaaaatcggctttgtggctaaacgtgtctgatgaggcagaaaaaaattaactgaaatcaaaagccaataactctttattaaacaatataaaagcagtcgacgagaccagcacacatatgaaacctgagcaaaagacattaaatttagattcattttactcggacatactaaaagaggacgaattaggagcagccatccgcacgcacatttatatagagtcagctcttgagcagctgattgaaatattagtttcagattatgagcacatcaaaaagatgcagctcgacttctctcaaaaggtaaacctagcagttgcggtaggaatgccaaaagatttcgccccagcacttttagcagtcgggacgattcgaaataaatttgcgcacaggattgacacaaaaattgacaaggagaaaacaaacaacctttacaaacagctttcacccgaccagagaagtgcgatacatgcatcattcaaaaacacgctaaaaaaaacaccactagatcaagcgaggaatctttccgacatcacacctaaagagcaatttgcaattttatctgtagcattattaatgcaaatcctcaccctgatacaggcacacgatagataaaaaagctgaattgattggaaccacacagtacttttattaaaagcgtgatcttagcgagaactgcaccgttcgtatgaaatttacagcatcaactcataaggccccagcaccttactagtctgcaccaacccctgccgcatcaacatctcaagataactccccgcctccatcggaggccgcttcaacgcccgcctctgcttctgcgccgctcccagcaccgccgcctgatccagatcccaaagatccgaaataaagtcatctggatgcatcggctcaatatcataagcagacagaatgtgcgccgggaaatctttcaaattgaacgtcacgataacctcagctttgctccgaattgccgccgccagcacgtgacgatcatctggatcgggcagatccagactcgagcacagatcctcatatcccgtcaccaaagcgtcaggtatagccttgtccatcagcgctgacgtgcaattcacttgctccgccgtcagatcgggccggttcttgagtacgttgcgcttccactcctcatgaatctggcgggtccatctcgctcgatacagccctgacaagccaagccacatcagtaaatcccgaagcgctgccgggtaaagaacacaagcatcgtatacagcagtaaaaggcgaacacctcatccgtcataccccattcccaactcctgtgcctgttgtgccaacgcttccatcgcctcctgactttcctcatccctccgctgcttgaacgccatcaagtccgaaaaacggatgcgtcgatgccgaccggtttttgtaaagggaatagcgccctcctccagcatcttgaccaagtgcggccgtgaaacgttaagcaggtcagccgcttcctgcgatgtcaattcagcgtgcaccgggactaccttgaccgcattgccgatcgctaactcgcccaaaatatcgaccagcaagcgcagtgctgaggtggggagtacgaggctgtgaggcttatcttctttgtcgaagatgtcgatgcgctgggtttcaaatttggtcgacagcagcgaggccagctcacgctggccttgtacggcagcttcgacttccttttccagaggaggaatggttttagggaggtgattggccatcatgatgcaactccggtgtttcgaaattcagttgagaccaaacctaaacgaaacaaacgaaaatcgcaatattcgaaacaccaacatcgggcgctacccaataggctcctacttccgcttggtaagctcatcacctccttcgcagaaacctgcgataccaacccactccacccgccacggccccgacaacaaccaccccattccccaccagccaaagcccaaaattccggctctgctccgcatccccctcataaaacggcccaaaatacgccgataccaccactaccacaccgttaaacaccccaagtgccaccgcaaccaccagcacaacaaacaccacccccttaaccactttcaggcaaccttccaaaaccagatctccctggactcgtgataatccgagaacgtcccttcaatcgaaaaccctagttgaatacgcggatagctcaaccagtccgtcaaccgccgcccgttccataggtcgatgtgatcaccactgcgattaccaaacgtttcgtttccccggcgccaaaagtctttgaagaagatgatgccttgttgcccagtcaactcatcctcgaagttttcgggttttatctttttcatgcttcgtaaaccggaagtgacgatacggcttaatgcgttggccatttcctctgcggccagtatgtgcccctcgcttttgggatgctgccaacaatagcgcacgctgcttaatctgctcaggtcaacgccagatctacgcagtgccacttcaagattgatcgcgcattgatcactgaaattcttggcgccgttggttctgcatggtgctgcgtcgccaaagatttccgggtggtttttccatagggtgttgaatgtcagcattctgcttttccatgcgtattttttccgcgaccgtagcaaacacggtgcggctgaagagaactccagagcgaatccagaaaggtcctacgcaagaactagacctggtttgcaggacaacacgcacatacctgtcgcgcgtggatcaaggagctcaaacgctcgccttctagagcgctgacaacctgttgccttttcccacgccagccatcgaacaaagccaatacctcccatcgctcccccctcgtaggctcacctcctcgcacaaggaagtgagcccgtcatgccagaacgcttttacccacccaccgaagaagagttacgcaaacaacgcatcctggcaccgcagccatcgcgtgcgccgtattcgccatcggttgattttttcgagccatcccctgtcccagcccctacgcgagccagacctcccggctgcgtcttcatgaagccttgccaattgcctgacggcatcactcattacttcaacccggcagggtatgtgccgttggagctgatcagggagtacggccacttaagcctgctgggtgggcgtgaggtggacagcaggggcgcggttgccttgcgcaagatcggcggcagcacattgcccgctggcttggggcagttggcgttgcggtcggcggtttgggagtcggcggcgactgccgttggatcggtcgccgggggcctgctgacgggtttggtggcgctggcctggccgtcagagttgggtgatagcgcgctctacaacgaggagcagttgcgttcgatgcaacgggcgcggtcgcagatgcggttgcatatcgagcaacgcgaggacggcacgctcaaggggtatgggttctacacgggcaaccatgccgattggcagatgattgatgtggtgcagtttcaacagcgtaacgatcagtttgtggcggatttgggtgagggtgtggagctgatctggacgcccgccgttgatcccagtgacacgctggggattccggccttggaggctgcgccgcaagcgccggtgatctggatttatccgccgacggagaaagcggcgcagattctggtgaacccggtttatccaccggagtatcgggattttattctggtgttcccggtggagtcgggggtacggccgctgtatgtggtgctcaacaagccaaggaaaggttggcttacgtgaacgttggatagacgcaaaaggaagaaaaatatttgaatgggattccaagaaagccgagctggaagtctatcgaaacagtgacttggaacacctcggtgcatttgatccttataccgccgagcgtcgaggaccggcggatccgaaacgtcgaatttatagataaagaggattttgaaatggtgatgaaaatcagactgcgatggtacgaaaagcacagcaatgacttgaaagcggatgaatactcagcggatatcgcagacccagacagtatttttgaagcattgggcttaagcgaagagaccgcgatatatgccgacgtattcaacgtccaacccaattggataacgctaattcagccgtacttccagcacgtgatccaacccaaccacctcgactaccaaatctccttccgctaccaaggcgcctggccaccgcctccaaaacagtccaaaaaggcgtcgtgatgcaattatagaacagaagagaaagacgcgaaaacgtaacggcggcggtcttcgggaacgttggaaggacgcgaaaggaaagagactttttgagtgggattcggaacaaggtgagctggaagtccaccgatacagcgatgtgaaacacctaggttcatttgacccatatacgggagagcagcggggcccggcgaaagatgaacggcgaattacaaaataaacggagagtcaatcatggtgatgaagataagactggaatggtttgacaaacaaaccgaaaacttagaggcggacgaatactcagcaaacctcaacgaggatgatggcattctcaaagcactggacctccatgacgagcctcaaatttatgccggaggattcgatgttctcccaagttgggtagcgattctccagccacatttccgacacgttatagagcctggccttttcgactaccaaatctccttccgctaccaaggcgcctggccaccgcctccaaaacaatccaaaaaggcgtcgtgatgcaatgaaacccacatcgcaaaaacccctcctctaccgctcagtcaacacccgaacccatggcgtgcgccacggcagttgtcgcgcctaccggtatgagcggcacaccaaaggcgaaaaagacaaacaatcaaaccgcgggtcgatgcatagccatcaacggcatggctttgattacaccccgctattccgctttctcctctccaaagtcggccacccatgggaccaggtgttcagcgaagccaacgcccgcctggatcgcccagagccggtgttctggatggtcgcgcaacatgaaagcgacaagcaggattacgtgagaacggatgaaaacagctactacagcggcttgtatgtcgacgaaggcggcctgctgcaaaaggtcaacccacagctgacgcccgagcagatgaaacccttctgcaactgcagcacccacaccttcaacggtgtggtattcccgcagggtctaccacacaacggctaaccctcaacccgacttaaccccactccccgcctcagccaccggtacccgattcgccggatcggtcacgtcatacacatgctgctcacaccccgagcccttgaattggaattccaccaggtacacctttgccttctccgggctgaacgtattcatcactggcccgcaggtgtagtagtaaccggtgcgggtatcgttcgcgtaccccgataccgtgagtttcttgccggggtcggcctggatttccagttgtgggaatcgcttgaagcccgcactggccacggtctggttgagcttggcgatccagttgaagaccttgccttcgccggtgtccatcacggtgccgagggcttccatgcgtgggtcggggtcgccttcgcggctgatcgagaagtcgacggcgggagtgccgccactggacttcatgatgactttggcgtgttccgcatccacagccacggttttctggcgaaactgaatgccgtccttgagcaggctgggcgatgagtcgcgttggttggattggcaggcgcccagggccagggcaatggagagcagcgcgattcgcttcacgggggatgtccttatcggggaagagtgtgatgactggacccgaatttaaacggattgttccgcttcaggagggatgagcgatgccgccgttcaggcgctctcaaacaccaaccgcgcgcacaacccaccctgcttgcggttatgcagcgccaaccggcaaccgatcttgcctacgatcatctgcacaatcgccaaccccaagcccgcgccattggcattatcccggctgtagaaccgttcgaacaggcgctccatttgcgcctcatcaatcccggggccccggtctttgacactcaaacaatgagcccccatcacgactgtcacttcactgcccgccggggaaaagttaagcgcattggtcaccaggttttgcagcgcaatcgccagcgccacgggctcggtttcgacccagcagtcttcgttgccttcgagcaccagctctacgcctttttccatggccaggggggtcaattcggcgagttcttcgcgcaccagttcagtcaggtgcacacggccgcacacggggttgtgcaactggggttcgatgcgcgccatggtcagtaactggctaccaatacgggtagcgcggtcgacgccattgactagaaaatccaaggcttcgcggcgctgttctccagtgacggcgctttgcgcgttctgcgcgtgaatgcgcaggatcgccaggggcgtgcgcagttcatgggcggcgtcggcgatgaagcggcgttcgcggtcgagcagttcatccacttggaccagcagccggttcagcgcggtctgcatgggttccaggtcggtcggcagtgggttgaggtgcagcggttgcaaggtttcggtattgcgtccacgaatcgacaacaccatggcgcgcagcggtttgaagccccagccgatcaccagccagatcagcaccgtcagcagcggcacgccgatcagcgtgggccacagggtgtggcgcatgatgcgctggatcacgtcctggcggatgtcgtcgcgctcacccacccagatcaacacgccctgttgcgggtcggtgaggagaaaggcgcaccagtcgttgccgttgtccatcaggtcatgggagcccagggtggtcggcggcgccgccagcaccggcgcttcggcggagcgcaccagcagctcacccgcgctgttccagacctggaaggtcaggcgggtttcatagggatgggccacgccgtcctcgccgacgcggctcatggcctggtcgaacgcctggtacaaccgttcccaacccgcgtcctcagggtcacgctggcgcagcacgccttgcagcaggcgcgcactctgggcgagttgggcgtcgtagacttcttcgatttcgtggtggctgtcgcgcagtaccaaccagctgatcaaggcatcgcccaacaggatcaacaccaacaccgggatgaggatgcgcgcgcgaaccgaggtcatgcggtgagtaccagcacatagccgacaccgcgtacggtgcggatcaactcggtggataactttttacgcaggttatgaatcagtacttccaacgtgttgctctcgacccggtcctgccagccatacaacgcgcgggacagccgctcgcgggtcacgaccttgccggggcgcaccatcagttggtgcagcagttggtattccatgggggtgacgatgatgtcggcgtcctggtaacgcacctgctgcgtggccgggtcgaggctgacgccggcgtgttccagcagcggttgcgcgcggccctggctacggcgcaacagcgcacggacacgagccttgagttcttccacatcgaagggtttgaccaggtagtcgtcagcgcccgcgtccaagccggcgatgcgttcggcggtgccgtcgcgggcggtgaggatcagcaccggcaagtcgtgttgctcggcgcgcagttgctgcaacaggtcgaggccgtcgaggcgtggcaagccgagatcgagcagcagcaggtcgaacgactccgtgcgcagggcatgcagggcggcaacgccatcttgcagccagtcaagggtgtagccttcggcgcccagggccacgcgaatacccaggccgagggcacggtcatcttcgacaaggagtaggcgcattacggattctctgtaggaaacggcgaaatcatgccgggtttcaccggcgcaccctcggcaaagatgttactgctcgttgccaactaagcttgcactaaggttggttttgcactgtgcaaactcctacgtttgctgagagcttttccatgcgcaaaattctcctgctgtccctgattctcgccagccccctggccgtcgccggcccgcagtgcaccaccgccgaacgctcgcaatggcaggacgaaaaagccttccaggacaagctcaaggccgaaggctacaccatcagcaagttcaaggtcaccgacggcaattgctacgagatctacggctttgacaaagacaagcgcaaggtcgagatctaccacgacccggtcaccggcaaagccgtgaagaccgagatcaaaggctgatgccgggcgagtccctgcacctgtgggacccgttggtgaggctgtttcatctgtcgatcgccggggtctttgtcgccaattacttctttaacgaagcaggcgacgactggcatgtctggctgggctactacgccatggcctggttgctggtacgtggggtgtggggatttgtcggaccgcgtagcgcccaatggacggacttctggccgacgccacgacgcctgactgcccacctacgctcgctcctcagcggtcggccacagcatcgcctgggccattcgccgattggcgcgctggtgatgctattgatgttgctggcgctgctgaccctcggtatcagcggttttctgatgcaggaggtcgacgccttgtggggtgccgattggccgctgcaaatccacgagactgcggccaatgtgcttttgggcctggtctgcgtgcatgtgctggcagcgatcgttgaaagcctccagatgcgggacaacctgcccttgtccatgctcaccggtcgcaggaagcgcctgccggatgaacgtgcgccgtaattctttgacccacaggttctctatgcgctccgtcctcctgatcgtcggcctgctcgcggtgtttttcgccgcctggcaaagccatccgccccatgtactggcaccgtttgcccaggtgagcccgaacaccgccaaagtggcatcggccccgcagtacaccagccggtttgtatcgacacagctcaccgactttgtgcattcctcgtccgtcaccgccctgcccggtggcgacttgatggcggtgtggttcgccggttcccgcgaaggcgccgccgatgtgcaagtgcgtaccgcgcgctttgacgcccacaccggagaatggggcgccgagcaggtactggccacacgggaaagcacccgcgacggcacgcagcgctatatccgcaagctcggtaatccggtgattgccctggcgccggaccagcgcctgtggatgttttatgtgtcggtatcggttgggggctgggccgccagtgcgatcaatgtgatggtatcggatgacctgggcgccagttggtcggcaccgcggcaactggtgacgtcgccgttcttcaacatcagcacgctggtgcgcgccgcgccggtgttccatgccgatggctccatcgggctgccggtgtatcacgagttcatgggcaagtttgccgagtacctgtacttgagcgccgacggggcggtgatcgacaaattccgcatcagccgcggcaagcattccctgcaaccgactatcgtgccgcaggatggcctacgcgccgtggcgatgttgcgttacgccggcgacacccaccaccgcgtgctggccagccgcaccgaagacgccgggcagacttggagcgagccctacccgctggcgccagccaaccccaattcatcgctggcggcggtgggcacgcaggatgatggtttgctggtggctctcaatgacttggaggacggtcgcttcaagctcagcctgtatggcaccgacgcacagctcacacagtggcgcaccgtggtggaactggaccagtcacccgacccgctcggccaaccgttttcgcccgaggcctataaagcaatcatcggcgagggcttccgcgcctccagcggtgcccggcgcctgccgctggagcagcgcttcctcagtaacctcgactaccgcgtgtgcaaaccccagggctgcgatttcgaatacgaatacccgtatttcagccgcagcccggacggcatgtaccacctggtgtattcgtggaataacacctttatcaagcatgtcagcttcaacgaagcttggctggcggagcgtctgtgatggttgctgtgtggcaggcccatttgagttttgtgttgctgggtttcgtggcgctgagcgcgctgcgcttcaccgaagcgtggcggccatggttgctaccggtgttggtggcggtgagttttatcccggtcaatgcgctgcccctggcggcgtatgtgcgcagttttactgatgacttggcgatcagcaccttggtgttgttggcatgggtggggttgtgccggctgggcgtggtgcgggcgctggatcgaccccatcaggtacagatgctgctgctctttgggctgctgagcctgttgctgtaccccgccaccttgggcctgacctatttcgatccttatcgttggggcttcaaccctcgcccgatgattgtgctagtggccgtggcggcactggtgatgctgtggctgcgcaacacgctggcggtgtggatgttggcggtgggcacgctggcgttcgcgctgcggctcaaggcatcggaaaactactgggactatctggtcgatccgctgctgacggtctactgcgtagtcgccggactaatgcaattcaaactgtgggagcgggcttgcccgcgatagcggtgtatcagttaccgctatgtttactgaaccaccgctatcgcgggcaagcccgctcccacatgggttctgcgtcgttttaaagaatgggaaaaataatgagtgcgttgcaatcacgccgcctgcgctacggcgtgggcgcgatcgggttggtgtttgtgttgctggccgcgttacggctaatgtttgtgctgggtttttccggccttggcttcagcactccggccctgctggaaaccgtgggcatcggcctgcggttcgacctgcgcctggcggtgctggtcctgctgccgctggccgtgctggcatggctgccgcgctggaacctcatcactctgccggccctgcgctggctggcacgcgggtatctgacggcagcgctggcattggtcggcctggtgtacatcatcgacttcggccattacgcctacctcggcgtacgcatcaatgcgacggtgctgcgctacctgcaagacgcacagatttcacaacagatggtgtgggaaacctacccagtgctgtggataactgcctgctggctggcggcggtggcgctgtgggtctgggcgctcgtctgtctcgaacgattgacactcgaccgtgcgcccagcgccagcggcaagctgtccttggtcgccgtttccgccattgcagtggtcggcgtgctactggcgctgctcggccgcgtcgcccatctcaatctggagaacccggtgcccttacgctggagtgatgcgttcttttccggcaacagccaagtggcggcggtaggactgaacccggtgctgtttttgtacgacaccctcaaggtcggccagtcgcagtttgatgaagcccaggtgcgcaagcattacccgcagatcgccgactacctgggagtcgaccaacctgatgcgcagcaactcaactttattcgcagccagagcgtgcagccgtatcgcctggcgggcgagcgcccgcccaatgtggtcttcgtgatgctcgaatcccttggcactagcgccgtaggcgcctacggcaacccgctcaaccccacgccgaacctggacaaactggccagccaaagttggttcttcaagcacttctacgtgcccgtcaccggcaccgccaagacggtgtgggcgagcatcagcggcgtgccggacgtgacccgccaggaaaccgccacgcgcaacccgctgattacccggcaacacacgctgatcaacgcgttcgagggttaccagaagttctacatgatcggcggcaatgccggctgggcgaatatcaacgcgttgatccgccagagcatcgacggtgtgcagctgtatgaggaaagccactggcgttcgccgcgggtggacgtgtggggcatctccgaccttgacctgttcaaggaaggtgacgcgttgctgcgcgcggtcccgaaagaccaaccgttcttcgcctacctgcaaacctccggcaaccatcgcccctttaccatccccaggcacaacgatggtttccaggtaaaggacgtgaccctggagcacgtccaggccgccgggtcgcgcagcgtcgagcagtacaacgcggtgcgcttgctggactacaacatcggccgcctgatggaaatcgccaaggccggcggctggtacgacaacagcattttcgtgttcttcggcgaccacaacacgcgcatcagccagatcccgcacatggcgccggcctttgagcagcttggtttggagagcaataacgtaccgctgctgatccacgcccctggcctggccccccgggtgatcgaggaggccgtggggctggcggacctgttgcccaccgtcgccggcatggcgggcataccgtttcgcaatggcgcgctggggcgtgatatccagcagccggcgcccgaaggcgaacgcgtggtgccgctggtgttgcgcgaaggcaccttcccgatcatcggcggcgtcacccggcacttcctgctgcagatgcaacacgacggcagctcgccgaccctgcatgacctggcctcacccagcccgcgagagaacgtagccgcgcagcaccccgaagagtttcaacgtttgcagggcttgacccgagggctgcatgagagcgcacggttgatgctgttcagcaacgtacgagagtgattattggggctggaaagtttcgaggtaggccaggatgtcggcaatcttgtcctggtcgctgatgccccaaaaaatcatccgcgtgccactcaccaccttcttcggcgcttcgatataggcggcgagcttgtcgcgggtccagaccacaccggagtttttcatcgcgtcggaatattgatagtccgtggtcgtcccggcgggcctgccaatgatgccgttgagctgcggaccaaaaccgccgcgcgcaccttcgccgatgctgtggcagccgccgcaggtcttggtgaagagtttgccgcccgcctcggcgtcgccggccgccaaagcggggcttgcgttgagggccagggcgagggtgaacagggcgtacttcatggcagactccacagcagttgtagcgggcgattatgcctgtttgtctggagcgcatgctcatccagattaccgtttcagtccttggggtgcgcagcgccactatcctcccgccccccttgcgcaaatgtgcaacctagaccctctgaatgaccatccatcgcttcatacatatccaatcgaacctatgcagctgtgttctactccacctctatgaaccctgatggtggagtaaggatcatggctcagccatcgattttggtattggaagacgacgaaatcattcgggcgttgatggtggatgtgctggaggaattcggcgcggtggtgacgtcgtttccttcggcggatgaagggatgatttacctggagcggggcgacgatccggtggacctgattgtcagcgatatccagatgccgggtttgctcaacggctacgatctgagcaaggtggtggcgcatcgttggccgacggtgccagtggtgttgacctccggtaatacgaagctggcgacacagttgggcggctcggtgcggttcctgcccaagccctggagctccgaacatttgatccaatgtgtgcaaaccgcgctcacccagcaaggtctatccatgcattgatagcgcttcaacatcactcgaaccgaacttcatggcgggcgctgtggtcattgatgaagcaaggagcgacttttctgatccgctggtcagccttttcgccttgtgcgtacagctgcctgccttgagttgtgtagaattgtcgcccattaaaacgcgtcattcatggccgagaggcccacagttcgagctcactgaatgcattcacaggcccatgacgttggtgcgccctctttgctggaaacgttgcgcacaggcacggccctgctgcatgtggcgttggaaaagcgcctgccgtttttctctgagcgcctggatgccgattggtatcagcgcttgcttgaggcgtactacgggttttatgggccgatggaagcggcgttgtacgaatgcgatttgatacctgagggcttcgaccaggggttacgtacgaaaaccccgacgctagtgcacgatctcgatgcactgggcctgaatgaacaggctatcggcgccctgccccgctgcgccgaactcccgaatctcgacacccccgccgcctgcctcggagctctgtacgtgctggaaggcgcaaccctcggcggccaagtgctgcgccgggaaatggctcagcgcctgagcatcaatgccgacaacggtggagcgtttctcgatgtatacggcgccgaaaccggtcgacgctggaaagactttctcgattacctgggccgcctgccgctggatgcccccgccaaacagcgcgcggtagaggcagcccgttcgacattccgctgctttgagcaatggctcgacagccaggaggtactgctatgaaacccgaagattttgaagagctgcttgccaactgtgccaacgagccgattcgcttcccgggggcgatccagccccatggcgtgctgctgacattgtccgagcccgagctgaatatcatccaggtcagcgccaacgtgggcagcatgttcggccatgcgcccgaggcgctgctgggccagccgctgcacacgctggtgggcgccgagcacgcccaggccgttgctgccatggccgaaaacaacacgttttttgacgcgccaccgctgcacgtttcctttaacggcgcagagttcgaaggcctgctgcaccgccatcagaatgtgctggtgctggaattcgagccgcgtctcaaagacttccgtccacgggcactgaacgggcgcaccagtgaccagggcaagatgctgcaacgtttgcagtcggcgaaaaccctgcaagcgctgtacgaaatcagcgtgactgaaatccaggccatgaccggctacgaccgcgtgctgatctaccgcttcgaagacgaaggccacggccaggtgatcgccgaagcgtcagcgccgtccatggagctgttcaacgggttgttcttccccgcgtccgacatcccggagcaggcccgcgagctgtaccgcaccaactggctacgcatcatcccgaacgcggcctacgagccggttccgctgttgcctaagctgcgcccggacaccggccagccgctggatctgagctttgccaccctgcgcagcgtgtcgccgatccactgtcagtacatgcagaacatgggcgtgttgtcgtccatgagcatctcgctgatgaagggcgacaaactctggggcctgatcagttgcggcaaccgcgagccgctgctggtgccgaacgacttgcgcactgcctgccagaccatcggccaggtgctgtcgctgcagatcagcgccatggaggccctggacctgagccgccagcgcgaagagaaagtcgaggccctggcgttgctcgaccaagcgatgaagcgctcggcagagaacgtattcgacggcctggcccagcaaccgcagttgctgatggacctgaccttgtccggcggcgtggcgatcatcgaagacaaacaactgcaccgctacggcaactgcccggaaccggcgcagatccgcgccttgcacaagtggttgcaagcgcgcggcgagccggtgttttccagccataacctggtgtcggtttacccaccggccgctgagttccaacaagtggccagtggcgtgttggccatgagcctgcctaagcctgtggacaacggtgtgctgtggttccgcccggaagtgaaggagaacatcaactggagcggcgacccgaaaaaaccgctggacctggaaaactctgacgccggcctgcgccttcgcccacgcacctcgtttgaaatctggaaagtggaaatggccggcatctccaccaaatggagccacggcgaccactttgccgccaacgacctgcgccgctcggccctggaaaacgacctggcgcgccaggtgctgcgcgagcaacaagcggtgcgtgcgcgtgatgagctggtggcggtggtgtcccacgacctgcgtaacccgatgacggtgatctcgatgctgtgcggcatgatgcaaaaggccttcagctccgatggcccacacacctcgcgacgcatttcctcggctatcgacaccatgcaacaggccgccgggcgcatgaacgtgctgttggaagacttgctcgacacctcgaaaatcgaggccgggcggtatgtggtcaagccggtggcactcgacgtgacccagatcttcgaggaagcctattccctgctggcaccgctggcgatggataagggcatcgacctgtctttcaacgccgagccgggcctgcagatcaatgccgacccggagcgtctgttccaggtgctgtcgaacctgatcggcaacgcgatcaagttcactccgcgccagggcaacatcggcatcagtgccatgagcaatggcgaagaaattgtgttctccgtgcgcgactccggcgaaggcattgcaccggaacaactgccgcacgtgtttgaccgttactggacccagacggaaaacaacccgaccggcagcgggctggggctgtatatcacccaaggtatcgtccaggcccacggcggcaagatcgttgccgagagtgaagtgggtcgggggagtgagttccggtttacggtgccgaaggtgatcgacgactcgcatacctgagtgggtggtttgagggctgctgcgcagcccagcgcggggcaagcccgctcacgacaaggtccccttaaaccggcagcaccacaaccgcttccagccctccgccgtggcgttcggtcagggtcagggtgccgccgtgttccagcacaatcgcccgggcggtcgagagccccaagcccacaccgcccgtgcttttgttgcgtgagccttccaggcgatagaacggcaggaacacctcctcccgatgttcagccgcaatgcccgggccgcgatccaacacgcgaatcaccacctcgtcctgtgtgtgctgcaactcgatctccggcgcgacgccatagtggatcgcgttgtccacgaggttggtcatcacccgcttgagccccaggggcctgccgaaatacaccaggcgtggcggaccgtgaaaggtgatgtcgagcgcctggtcgcggtagtcgtcgatcagggtttgcagcaactcggccaggtccagttgggtggccggttccaggcgggcgtcgtcgcggaagaattccagggcggtgttgatcatggcctgcatttcatcgacgtcgcgaaacagccgctgctgctggtcggcgtcttcgatgaattccccgcgcaggcgcaggcgcgtcagcggcgcacgcaggtcgtgggagatggccgcgagcatttgcgtgcggtcctggatgaagtggcgtaactgcgcctgcatgctgttgaacgcaaggatcgcctggcggatttcatgaggccccaccggttcgacgggcggtgcgcgaaagtctgcaccaaagcgccgaacgccgtgggcaaagtcctgcagcggtcgcgccagtcgccgagtggccaccagggtgaccagtgcggtggagatcagcaccagcaataccacgatcacactgcgtgcgccctcgtccaggccccagctgcgggcaggcgcggtgaacatcagccaggaatgatcagccagttgcatcagcagcatgtagtggccattgccgtcgggccaatcggacggttcataggcttccatagggcggatcgggccgtcgagcaggtgctcgaaggcctgttctcccgactggaaatccgggtcctgcagcacgggcaaatcaaatgctgttcgctgcgccgaccacctcacgctgaacgcgtcgtcagccattacttctgccagacgcggtcgttgcgccggcgccgacgcttcgaccacgcgcaccaccacggcgattttttccagcaggccggtttcggtgagcggcggccgtgcccaaacccccgccagcttcacgaacagggcgttgaacgccaatgcggtgaacatcgcgatcagcaccgtcagggcgatccagcgggccacggtgtcgcgtgggcggcgactcatgagcgcgtcacgctgacggtgaattggtaaccgccgttgcgtaccgtgcggatcatcgccgggcgtttggtatcgaattccagcttgcggcgtaggcggctcacttgcacgtcgatgctgcgatcaaacgcgtcgtggctgtggccccgcgccaggttcaacaactgctcgcgggtcagcacgcgctgggggtgttcggcgaacaccagcagcaggtcgaactcgccggacgacaacgggatcatcacctggtcgggcgagcgtaattcgcggcgcgtgagatccagttgccagccagcaaagcggatcaatgggcgggcgacctcccccatcggcggtcgcgcttcacccgcacggcgcatgactgcgcgcacccgggccagcaattcgcgggcatcgaaaggtttgctcaagtagtcgtcggcgcccatttccaggcctaccacgcgatcgctgagttcgcccatggcggtgagcatgatcaccggcgtcgcatattgctggcgcaggcgctggcacagcagcaggccgttgtcaccgggcagcatcaggtcgaggatgatcaggtcagccggctggcgctccatggccgcccacagctcggcgccactggcagccgtctcgaccccatagccgtgttgcaggaaaaattttttcagcagggcgaggacttcaaggtcatcgtccacaatcaacaagttgctcaccgacggtcttcactgggtggggtcgaggcgctatctaaaaccattcggcacggtccgtcatatatttcaatcgtgcaataaagcgtcaacggcgcaataaaccagacatctttgcgcaaggtcgcactgccaggatcggcctcccttttttgcggagactgtgcccatgtgctcgctgacctacccccggcatctggcccgccaggccgtgctgttgctgacagtgtcttacctgacgggctgcgcaagcccggccccggtagagcccgcgactcgctgtgcgcaggtgaattacccggtgtatgacccggccgagccggtcaaccgcggcgtgttcgcgttcaaccgtgctgtagatgactacgccctggcaccggtagcgcgaggctaccgttacctgccggattttttccagcagggtgtgcataacttcgcgagcaacttcagcgagccggagatattcatcaacgacctgctgcaaggcaacccgagacggtcggtcaataccctggggcgcttcgccgtgaacacaacggtgggcgtggtggggttgttcgatgtgtcggatcgcctgggcatcccgcgccataaagccgacttcggccagacattcggtgtgtgggggatcggcaatgggccgattgtcgaactgccgttgctgggcaccagcaatagccgggatgcagcgggcaaggtcttgggcttcctggtttcgccactgggcgacagcgataccgtgcaaaccctgggcaccatcagcctggtgggcggcaccgtcgatacccgtgcgtcattgttgccgctcaccgacagcctgcagaaactgccggattactacagcgcgttgcgcaatgtggtggcggaaaatcgggcggcctttgtacgcgagggccaggaaggcgcgacatctcccgggctggacggttgcgccaacagcgcctcggatgacttctgaaagcactggccacccgtgtcatatcttgcagcagcgcgtttatagctgactcgtttcgccctctataaatttggcctcacttcgctgcaactggcgaagtagtcctctactcaatagaaggaaacatccatgctaagcgctatcaatcacacactgggcagctttcaataccctccactgcagcaggatgatgcagagccccagcgcaggaagcgcagcattgacgtcacacactcgcaactgagcgccgccgatcctgagagcacggcagccaacgaccgtcgcaaaagcggaggtgggctagacactctgggtcaaggcaggttgctctaacccgccttaatacgaagggcagtgcacggcccttcgtactgttgtttaacaaaaccatgacattcactgggctaaccttgccggttaaacccagcgtggaacccttacctgcatgccgcacctcgacacactgcccgccctattggccggcccactgctgcgccgcctcgaaccccggcgcctggtgttgtggctggtgggaagtcgagccctggaactgaccctgcagttgcatctacccgcccaaaccctggagatcaaccttgatcattgcaaggtcgtatcggttgggcaccatgcttttatccacttgatcgatgtgccattggacgaggccctgcccctggacgtcgcgatcggttacgacgtgttgttcgacaacaccggcatcgccgagtgggcaccccacctgctgtacgccaacacccactacccaagttttgttttgcacagccgtattcatcagttggtacacggctcatgccgcaaaccccaccacagcgccgatgaaggcctgctgtgtgtcgatcgcctgctggccaacgcctccactcccgccgaccgcccggccctgctgatgatgagcggcgaccaggtgtacgccgacgatgtggccgggccgatgttgcgcgcaatacatgcattgatcacacgcctgggcctgttcgatgaatacctggagggcgccgtgatcgacgacagcgcaagcctctacgggcatcgtgccagttactaccatcgtgccgacctgctgcccgcactggacagcaacgaaaccctgcgtgaacgcttctttggcggtgtgaaaaagccgatcttcaccagcagcactgccgacaatcacctggtcaccttcgctgaagtcattgcgatgtacttgctggtatggtcgccgacgccctgggaactgatcgcgcctgaagcgccgcaactgagcacagaagaactgcagcgctacgcccgcgaacaggtgcagctcgatcgattccgcgagggcctgccaggtgtcgcccgggtgtttgcccacctgtccaccttgatgatctttgacgaccacgacatcaccgacgattggaacctcagcgcccaatgggaagccaccgcctacggccacccgttctctaaacgcatcatcggcaacgctttgctggcctacctgctgtgccagggctggggcaatcagccggatgcgttcagcaagctggtcagccaaacccaggcgcttacctgccagccacaggccaatcacctggatgccgccgcccaggatgaattgatcgacgcgctgctcaagttccagcaatggcactacgtactacccaccaccccagccctggtggtactcgacacccgcacccgccgttggcgcagcgagttcaccctcaagcaaccgtccggcctgctcgactgggaggcgttgagtgagctgcaacaggagctgctcgaccatccctcggccattatcgtgtcacccgcccccatctttggcgtgaagttgatcgaaacagtccagaaaattttcagctggtgcgggcacccgttgctggtggatgcggaaaactggatggcccatcgtggcgctgcccaggtgatcctcaatatcttccgccactcgcgtacgccgggtaactacgtgatcctttcaggtgacgttcactattcgttcgtctacgaagtgctgatccgccatcgcaacgccggcccaaggatctggcagatcaccagcagcggcatcaagaacgagttccccccacgcctgctggaatggttcgaccgcctcaaccgttggctctactccccccgctcgcccctcaacgggttcacacgccgtcgcagcatgaaggtggtgccgcatattccagaggacgccgaagcgggcgagcggttatggaattcagcggggatcggccaggtgtttttcaacgatcagggccagcctgaagcgatctaccagcacaacgcggatgggcgggtgcggacaaggatgacagcgccgaagtaacttttcccacagacataaaaaacacgttcacgccagtcttgtagaaagatcacaagtgactgtttaaatcgcacggatcatttttacgctggtgggctgtgacattgtgctgctgcatggcttcatcaaaaaaagccaaaaaacacctgtggtagaactggacaccgcccggcgtcgtaaacgcaagctatgaggcacaacctatgaacaagcatattggctccaacttcgacgactttcttaacgacgatgggctcattgaggaagtgtcagcaggggcgttgaaacgtgtcatcgcctggcagttggcagaagccattaaagcccagaaaatcagcaaaaaagcgctggccgagcgtatgcacaccagccgtaccgcagtagaccgggcgctcgatcagaacgatgcaggcatgacattggcaaccctggcaagtgcggcaagggctctaggccaacgggtagaagttcggctcatacctgactcggatgcaatactgccgattacctgaagcggcatgccagacgctcaccgggaagccggactcttcagagacagccatagccattagccatcaacctttcgccgtacatctgccctattcaaagcgtccaagccccgttgtacagtagcgccagccacggagtatcggcgtcaacaacggcaggctttgcaggcctgcccacgcaaggaacgcgcagatgggcgatacctccgacaacaacccgttggaacaggacttctctcacttcaacgccgacatgctgcacaccgtgctggagttggtcagcgacgggatctgggactggaacgccaacaccgggttcgtctaccgcaacccaggctggtacgaaatgctgggttatccccgccacgcgctggagaacagtgtattcacctgggaaagcgtgattcacccggacgactatgcccaagtgatgaagttgtttgacgactacatccaccgtcgcgcccctcactaccaagccgaataccgctgtcgcaaaaaagatggcagctacctgtggatcgaagaccgtggctatgtgattgcgcgtaacgcagacggctcggtcgcacggatggtgggcgcccaccgcgacattcatctgcgaaaatgctccgtcgagcagttggagcaacgcaatcaatcccttgaggcactggtggccgagcgcacacgcgagctgtcgcgggtcaaccagcagttgcagctacagctggatgaaaaccgctcgctggccgaacgggatgccctgaccctggtcgccaaccgctaccgcctggagaaagtgctgctggaagaatgcgaccgcgcccaacgctttcgcctgccgctgacgctgatcgcgatggatatcgatgacttcaagccgatcaatgaccgttttggtcatggcgtgggcgatcagacgctggtgcaggtggttgaatgtctgcaacgctgtattcgcccaggtgatctgttggcccgatggggcggcgacgagtttgtgctggtcctgcccaagacctcgctggaaagcgcgaaggcactggcaaatagcatccgccagcaattgagcaacagtccgcacagccacgacttcagcgtcaccttgagcctgggtgtagccgaacgcgagcgggatgaatcccccgccgccctgatagcgcgtgccgaccaggcgctgtaccgcgccaaggcggcggggaaggatggggtctctgaataacagcccccgtgttaccgaaccggcggcgcgtactggatgccgccgttgttccacagcgcgttgagcccgcgcttgatcttcagcacgctgccctggccgatattgcgctcgaacacttcgccgtagttgcccacctgcttgacgatctgcaccacccaatccttgcgcagcttgaggtccttgccgtattcgccatcagcgccgagcaaccgcgcgacatccgggttcttggtggtcttggcctgctcttcgacgttctgcgaagtgatgcccatttcctcggcattgagcatggcgaacaaggtccacttgacgatgctgaaccactcgtcatcgcctttacgcaccaacggccccaacggttccttggaaatcacttccggcagcaccacgaactcgtccgggtgggccatcttgatgcgctgggcatacaggcccgactggtcggtggtcagcacgtcgcaacgcccggcttccaggcccttggcgctttcgtcggcggtgtcgaaggtgatcggcgtgtacttcatgccgtgggtgcggaagtaatccgatacgttcagctcggtggtggtgccggcctggatacacacggtcgcgccgtccagttgcttggcgccggtaacgcccagtttgttgttcaccagaaagccgatgccgtcgtagtaggtcacgccggtgaacaccaggcccatgcccgaatcgcgggagctggtccaggtggtgttgcgcgagatcaagtcgatttcaccggattgcagcgcggtgaagcgttccttggcggtcaactgggtgaacttcactttcgatgcatcgccgaacaccgccgccgccactgcgtggcacacgtctacatcgatgccggtcatcttgcccgtgctgtccggcacgccgaaacccggcagcccgtcgctgacgccacactggatgaagccttttttctggatagcgtccagggttacgcccgcataggcgctgctcaccagacccaatgcagcggtggtgccgatcacggccaaggtggttttgaatgggttcatgcaaggctctccctgtcattccttattattcgacgccccacagcccgcgccggtttatagtgctgccgggcagtatcaacggcttcgcaccgctgccacaaacgacctttaggcaaaggctccttccgatttggaatgaagtgcatgatttcaaaacgcttgaccccttcgatgaccgccctgcaatgcttcgaagccgccgcccgccacttgagcttcacccgcgccgccgaggagctgcacctgacccagagtgcggtgagcaaacaagtggcgcagttggaggagatgctctgccacaacttgttcgaccgggtgcgccagcgtttgtacctgtcaccggccgggtcgctgtacctggccgaagtgcacaagatcctcacacaggtggacatctccagccgttacatcctcacctacggcggcgaaaccgaagtgctgcgcatcgccacccagccgaccttcggcgaccgttggctggtgcccaagctcaaggattttgcggcgcaacatccgaacatccacctggatgtgcgcaacgagctggagccgttcgatgtgctacaagccaaggcggatatcgcgtttttcttcggccagggttcatggccgggagcaacctgcatcgagctgttccgtgaggcggtggtgccggtgtgtgcgccgggttttgtcgccgaaggcagtgatgcttcgtcgcgccacaccctgctgcaatgcacctcgcgcccggaggcctggcatgaatggttcctggagcagggcctgcactcacagaacagctaccacgggccacgattcgacacgttctacatgtgcattcgcgcggcgcaatcgggctatggcgtagccttggtgccgcagtacctggtggccgaagaactggcccagggcagcctgatgattccatgggactatgcgatgcccagcagcggcgcacactttatcgcccatgccgaacatgccggcgagatccccaaggtgaaggccttcctgagctggatggtcgactatgtgagcgcacatcgcgattttcagtcatgacccggcgactttatttcgtttgcgacaagggtgggcgcccggcttagataaaaagacgcccgtcactgtcgagtctgcgattcatgagccacgaaaccatcagccagtcgatttccatcgttcaccccatcagcctcaaccacggtaaaaatgccgaggtctgggacaccacgggcaaacgctacatcgattttgtcggcggcatcggtgtgctcaacctcggtcattgccacccgggcgtggtcgaggcgattcgtgaccaagccacccagctgacccattacgcgttcaacgccgcgccgcacgcgccctacatcgaactgatggcgcggctgacggcatttatcccggtgacctacccggtcagcggcatgctcaccaacagcggcgcggaagcggcggaaaacgccctgaagatcgtgcgcggcgccactggccgcacggcagtgatcgcctttgacggcgccttccacggccgcaccctggccacactcaaccttaacggcaaggtagcgccttacaaacagaaggtcggtttgctgccgggaccggtgtatcacctgccctacccgagtgccgacaatggcgtgacttgcgccgaagcgttgaaggccatggagcgcctgttcagcgtggaaatcgacgtcaacgatgtggcctgtttcatcatcgaaccggtacagggcgaaggcgggtttctcgcactggatcgcgaatttgcccaggcgctgcgacgcttttgcgatgaacacgacatcctgctgattgccgatgaaatccagtcgggctttggccgtaccgggcagcgcttcgcgttctcgcgcctgggcatcgaaccggacttgatcctgctcggcaaaagcatcgccggtggagtgccgctgggcgccgtggtcgggcgcaaggcgctgatggacaacctgcccaaaggcggtttgggtgggacctattccggcaaccccatcgcgtgtgcggcggccttggccacgctggacgcgatgaccgacgaacacctggagacctggggcgcacagcagcaacacgccatcgtcagccgctatgaaagctggcgcgcgcaaggcctgccgtacctggggcgcttgaccggtgtcggcgccatgcgcggcatcgagctggcaaacgccgacggcacacccgcaccgcaacagctcgctcaactattaagcctggcgcgggacgccgggttgttgctgatgcccagcggtaagtcgcggcacatcatccgtttgcttgcgccgctgaccatcgagcctgcggtgctggaggaaggcctggatatcctcgaggcctgcctcaagcagttgggctagtaacgcgcatccacgggtctgccgccgctcggccagtccttgaccttgtcggggaagtccgggcgcggttgacccgagaaatacgccgccacgtccaccgcttcctggtctgacaaaccgccctgccccagcgggaatttctcgtgaaagccgatcggcatgttgcgtttgacgaacgctgccgccgtgtaggtgcgcgccatgccggcgccgatgttgaacgattgctcgccccacagcggcgggtagatcagctcgccatcagcgcgtgccaggccctggccgttgtcgccatggcacaccgcgcactgtttggcgtacacctgcttgccattggccaggtccggcttgagcgccgggtcgaccttgcctacgccgcgcccggcgactttgtcttcgggacgggtgttgtttttcatccagtcgaagtacgcaaccatcgcctgcatatccgccgattgcggcggcagtggcgtgccattcatcgagcggcggaaacagccgttgatgcgctcttccagggtcaccaccttgcccgcacgcggcgcatagctggggaaaaacgccgagacgcccacgaacggcgaaccatccgccaccgtgccggcattgaggtggcaactggtgcagttgagcgagtttccgacattggcgggcaacagcgctttggtttgcaggtgcaggcgcatgccacgaatgacttggtcggcattcggggcagcgagcagattggccagtcgcggggtttcaaacgccgatgagtccgtggtggccgggttgagttggtcacgcagttttttcacttgggcagcgctgatcggcgtgccttcgttgccccaacgggtgcgcacgaatgtcaggatttcggcgatttcctgatctttcaaacgggcgaaacccggcatggtgtagacccgtgggtgcgtcgccgtctgtgcggtctcccaaccggtgagggtgatgtgcagcagtgaagtcgggttgctggacgcgatgctcgggttgcccgccagggatgggaacaggcctttcacgcccgcgccatcgctgcggtggcagtcgctgcagaactgcatgtaacccaggccaccgcggctggtgaacaagtccgccgggggcgcggcgggcgccacggccacagccggcatgggcaggtcgtccttgccgggcggcagggacttcaggtaacgggcgatggccgtcaggtcgtcgtcactgaagtgctgggtgctgtggtgaatcacatcagccatgttgccggagaccgtggcaaagcggttctgcccggtcttgagcagttgcacggtgtcttccacggtccacaggttgcgcaggctcaaggcgcgccaatgctcgactgtttcaccggccaggtaatgctggccactgcgccccgcgtcgctcatggctttttcctggaaggcaatgccccgtggggtgtggcaggagccgcagtggcccaggccctggaccaggtaggcgccacggttgagctgttcatctcgcgccggatcggccaggaagggctgtttatcgagaaaggcgaaattccacagcgccaggccccagcgctggttgaacggaaagcccatgtccgcctcaagattggcctgctgcaccggctcgacgccttgcatcaggtagacgtacagggcgcgcatgtcggtttcgctcatcttggcgtaggacggatacggcatcgccgggtacaggttcatgcccgtcggcgttacgccttcgcgcatgacgcggtcgaactgttcgaaggtgtagccgccaatgcccgtctcgcggtccggcgtgatgttgctcgaaaagatcgtgcccatcggcgtgctcaactccaggccgccggccatgaccttgccttgcttggcggtgtggcaggcaatgcagtcacccaattgcgcgacgtatttgccgtgttcgatcagaggcgtgtcgggggtgttggcgtgcaggggaaaagacaagcagagcgtcgcccccagcaaggccaggcgggagagggaaagcgccatcgtattagtcctttgacaacctggcgtggggcggtcccctgggcgcaggtgtgtggtcgtttttatgggttcatcaggcctctgtgttgtaaaggatatgcgggcgaaggatgttgatatgggtcagggcgaaatcgatggcaacgacaggtacttgaccgttgataagttgccctttgaagccccgtgcacaattctgtaggtttcagccatcgaacgaggagaccaccatggagaccgtcacctacgccaacgcccgcgcccatctttccgaaacgatggatcgggtcaacgaagatcgcatcccactgctggtaacccggaaaaaaggcgagcctgtggtgatgatttcgttgtcagagttcaacgcgcttgaagagacaggctatctgctgcgctcgccagaaaatgccaaacgcctcatcagctcagccaacagcctgcgggcccgcaaagccaaagtagttgattgaataatgaaaatactcgcttcccctgagggcagaggcgactactgaatgaatttacccgcaggaacccaccttgacctgacctccctcccccctgaaaatgcccgacgcttttttgtcctcgtttactgaagtagtgaaatttcaatgtccgattcttacaccgaacactccgccaccgaagaatccgtcgtcgccttgcacgccaaagccgaatacgaaaacgccatcaatctttcacagcatctgcctgcggccaagatcatcagcgagatggtgctggacgctttccacacctccaaggaaagcgaccagatccgcgaactgcgcgtggccatccgtcaggcccacgatgccttcgacgacgacaaggcctacgacctgatgggtcagctcaagcagctcaaggatgccgaggccgccgacaacgctgccctggaaaacttgagcagccagttctccatcagccgcatactgtccagcttcaaggacgaccccgagttccaggagctggtctacggcctggcgcttaaagtgctgaaccagagccaccaggccatcagcaacccgagcgccggcaagagcaaggcatcccgcccgaagaaagaagccgaagtgtttgtgatcagcaaggatggcatcagcgtcaccctgccgctgcgcacgccgcgttcgaagcttaacgttgaccgtgaggcgttcgagttcctgggcttcagctttgtgggtgaaggcgatgaagcggagctggaagtcgagagctttgtggataacaccggcgccgagcagcctttgagccgcaagagtgtgattactgcgttgcagcagcagacggcgtttgatgggtacagcatcgcgcagcagtaacccttaatcccagccctttcaaggtctttaggtagaacaggcgaaaagtactctgtggcgagcgggcttgtcccgcgttgggnnnnnnnnnnnnnnnnnnnnnnnnnnnnnnnnnnnnnnnnnnnnnnnnnnnnnnnnnnnnnnnnnnnnnnnnnnnncccaacgcgggacaagcccgctcgccacagttgcagtgttcgtcctcagccagatagggtcggtttttcaaagaccttgaaagggatgagccttaatccgcaacactactgggtaccgctcccacgtttgatcggcgtcgcgtcaactgacctgctgcgcaaacacctcgcgaaaccgcgccatatcctgcttgtctcccaccgtcacccgtacccactgcggccagcttttaaacatccggccgatcagcacaccgtgtgccgccagcttctcgatcacctgctccgccggctgtttcacgtcgatcatgaagcagttggcctgtgacgccgtgcaggtgaaaccacgccccttcaaccaagccacagtttcatcacgcagttggctgttcagtgccttgcgttgcggcagcagtttcacgtcttgcaggctggcaaggccacccagcaacgtgctgcctgccggcacgttgtcaccgccaaacacggccagccgctccagcagcgccggatgaccgattgccaggcccaggcgcgcaccggccatgccgtagattttcgagaaggtgcgcagcaccagcaggtcgtcgtggtccttgacccaactgaccacgctgggaacatcggcaaagtcgatataggcctcgtccaccaccagcacgctgcctttgggtttgtttgccaaggcctggcggatggcatcagtgggcgtgacagtgcctgtagggttgttggggttgcacagatagagcatgccagcctggggatcggcggcgagcatggccgggatgtcgtgggcgtggtcggcgttgaggctgacttccttcaccgaggccctgttcgactcagcggcctggcgtggcacttcataggatggcgtggccatcaccagaccgcgggtttcactggtgaatgccagcactgcatagcgcagagcagccatggagccggcaaataccgccacctgttcttcgacaatgccctgttgctgggcaaacagcccggccagggcgtacatgtgtttgtaggggtaacgcccggacgttgcgattcccttgtgcatggcttcgcgggcagcccgtgagggcccgtaggggctttcgttatagttgagcagcaccttgtcaggcttggtcggcggcgggctggcaaccgcccaatcgaggcgtcccagcagaggcagggcggcgcccagggcgagaagggaccgacgacttacgctgaccatagggctactccttgtaggcgggtgatggattcgcacagcacgtactgaggggtatgacgataaacgcagccggggatttaaaccccgtccaagaaaaagccccgcgcttctctcgaaggcggggctttttcactgcgggaccactcagtgagcgtaggtcagcagcagctctttcggtacttggaaatccagggacatcatcacgctcagcgcggtgatggtgaagatcgagaacacgaacagcttgcgtgcccagacggtgtcatccaccgccttgtagccggtccaggccatgtacaaccagtacatgcccatggcggcagcgacggcgaggtagctcatgccggcgtagccactgaaggtcaacatcaaggtcgccacgaggaaggccaggatgtacagcaggatgtgtttcttggcgacctggataccacgctttaccggcaataccggaatcgacgcagccaggtagtcattgaagcggaaaatcgcgatggcgtaggaatgcggcatctgccacaggctgaacatcaccagtagcgtcagcgcggccatgtcgaagctattggttacagccacataaccaatcaccggcggcatcgcccccgacagactgcccaccagcgtgccgtgaaccgacttgcgcttgaggtacaggctgtagaggccgacgtagatgacaaaaccgatcacggcaaacagcgccgccagcgggttggccaccttgtacaacaacgccacaccggcaacacccaggacggtcgcgtagatcagtgccagtttcagggagatgaggccctggaccagcacgcgattcttggtgcgctccatcttgatatcgatgtcacggtcgatgcagttgttgaacacacatccggaagctaccaccagggacgtaccgatcattgcagccaggaagatggccagatcgacatgtcccttggaggccaggaagaaaccgcccgccacagaaagcacgttaccgaaaatgatccccggtttggtgatttggataaagtgcttaagcgacatcgggtcttacctcacttcgccatcatgaacgtatggatgctgaacatgatccatatcgacaggccaaccagcagtacgattacgatccctgcgaacacgaacgcaaccacgttgtcgcgctgctccttggaacggtccaggtgcaggaagtacaccaggtgcaccagaacctgaatcaccgcgaatgccagcacgatcatcaaggtgatcgacttcggcagggtcgggtacatcaccagaccgaacgggatgagcgtcaggattaccgacaggatgaagccgatggcgtacgacttgacgctgccgtggcttgcatcatggctgtcatggtcatgggagtgtgcattagccattacagagtccccatcaggtaaacaacggtgaagacgcagatccagaccacgtccaggaagtgccagaacaggctcaggcaggtcaggcgagtcttgttggtgttggtcaggccgtgcttattgacctgatacatcatcaccgccatccacagcaggccggcagacacgtgcagaccgtgggtgcctaccagcgtgaagaacgcggacaggaagccggaacggtgcgggccgtagccttcggagatcagcaggtggaactcgttgatctccatgccgatgaagcccaggccgaacaggaaggtcagggccaaccagctcagtacgcctttcttgttgcccttgtagaaggccaacatggcgaagccgtaggtgatcgaactgaacaacagcaaggcggtttcgccgagcacgtaaggcagttcgaagatgtcgtggcccgacgggccacccgctacgttgtttaccagtaccgcgtacaccgcgaagatcgacgcaaacaagatgcagtcggtcatcaggtagagccagaaaccgaaaacggtcatcggccccgagtcgtggtgatggtcatcgtgcccatggtcatcgacatgggcgtgtccagcattggtcactaagttcgacatggtttaagcctgttccaacgaggtttcaacacggttggccgggatcttcttctcggctaccaggcgagcgtgctgctcggcttcgatgcgctcgatcgtctcgaccggcaccatgtagccttgatcatcacgggcagcgtgaatgatgaagtaaccgatagtgcccaccaggctcacgattgccagccaccagatgtgccagatcatcgcgaaaccgaacacggtcaacagcgcgcccatcaccacgccagtggcggtgttgtttggcatgtggatcggttcatagtgcttcggacgctggtacgcagtaccgtcttccttggcttcggtgaacgcatcaatggtgttcgcggtagggatcacggcgaagttgtagaacggcggtggcgacgaagtcgaccattccagggtgtggccattccatgggtcgccggattcgcaagcgttctgcttacggtcacggatactcacgtacagctggatcagctggcaggcgatacccacagcgatcatcaccgcaccgaacatggcgacgtacaggtacggcacccactcagggttggtagtggcgttcagacgacgggtcatgcccatgaagcccagagcatagagcggcatgaacgcgacgaagaagcccgagatccagaaccagaatgcagccttgccccaaccttcgtgcagcttgaagccgaacgctttcgggaagtagaaactgaaaccagcgatgtaaccgaataccgcaccaccgatgatcacgttgtggaagtgagcgatcacgaacaggctgttgtgcaggacgaagtcagcacccgggatggccagcagtacgccggtcatgccgccgatggcgaaggtcaccatgaagcccagggtccacagaacctggctggtgatacgcagacggccatggtagatggtgaacagccagttgaatagcttcacccccgtcgggatggaaatcagcatcgtcgccagaccgaagaaggcgttgacgctggcacccgaacccatggtgaagaagtggtgcagccaaaccatgaagcccagtacagagatcgcgcccgatgcgtagaccatcgagtggtgaccgaacaggcgcttgccggtaaaggtcgagatcacttcagagaagataccgaacgctggcaggatcaggatgtacacctcagggtgaccccatgcccagaacaggttcacgtacatcattggattgccaccaagttcgttggtgaaaatgtggaaatccaggtaacggtcaagcgacagcagcgccatggtagcggccaggatcgggaacgaagccacgatcaggacgttggcccaggtgcaggtccaggtgaagatcggcatgtccatcagtttcatgccaggggcgcgcattttcaggacggtggccaggaagttgacccccgtcaatgtcgtcccgagccctgataactgtagcgcccagatgtagtagtccacacccacgccagggctgtactggatacccgacaatggcggatacgcaacccaaccggtcttggcgaattcgccgacgcccagggatacgttgatcagtacaacaccggaaaccagcagccagaagctcagggagttcaggaacgggtaggcaacgtcacgggcaccgatctgcagcggcaaggcaaggttcatcaggccggtgaagaatggcatcgccatgaagatgatcatgatcacaccgtgggcggtgaagatctggtcatagtgttcaggtggcaggtagccaggcgaaccctcggtggccatggccaactgggtacgcatcatgatggcgtcggcaaaaccacgcagcagcatgaccatggcaacgatgacgtacatgacaccgattttcttgtggtcgacggacgtcagccactcggtccacaggtaggtccacttcttgaaataagtgattgctgcaaacagtgccagaccacccagcgcgatcatggcgatggtcaccatcacgatcggctcgtggaacgggaccgcatcccaacttaatttaccaaacatcgtttactcctctgccccagcagttgaatgcgagcccgtgtcagaaccttcaaccacggccacttctttcttctcgtgcttgaccggcttgcctggcttcataccttcgtacttgtcgacgattttctgaaacaggttcggctcatacgtggagtacagggcgactgggttgttctggcttggtttggtcagggcatcgtattcagcttgatcaagctgtttaggtgcggccttgacttcggctacccaggcgttgaaatcttcctggctcgtcgagatcgctttgaatttcatgccggtgaagccagcgccgctgtagttcgcggagatgccttccatttcagctttttcgttggcgatcaggtgcaggcgggtctgcatgcctgccatcgcgtagatctggccacccagggctgggatgaagaacgagttcatcacggcgtcggaggtgatccggaaattgagcggggtgtgctcggggaacttgatctcgttgaccgtggcgatacccaggtccgggtagatgaacagccacttccagtccagcgcgaccacttcgatgttgatcggcttgacgtcggactccagcggacggtacgggtccagctcgtgggtcgacttataggtgatgtaacccagggcgatgatgatgaggatcgggaccagccacaccgcgatttcgatcttggtggagtgcgaccacttcggcgcgtaggtcgcgctggtgttcgacgcgcggtatttccaggcgaaggcgaaggtcatgatgatcacagggaccacgaccagcagcatcagcagggtggcggtgatgatcaggtttcgttgatccagaccgatctgtcctttcgggtccatcaaggtccacttgcagcctcccagcattaacatcatgccaagcagcggcaaaaagcctagtaatcgggggtacctgtttttactcatctcacgacctctaaagcagcttgcgcaatgcagttgggttttgatcgccaacacttcaccctgccaagggttggcatttctcttcgattgaataagagcctgcccatcacgtcataagggaacgtttcacggacctgcggtgagttcttattcgatttcgtggttaaaggccttgttacagaccaattccatttggtgcggatagttgaaaggctgccggaaccttggggtcgcacagagccatccatctgcccttcgaccgctccggtgctcaaatattgaacagcaccggacattcagtgcgggcgattgtagttagctagcgatgtataaaccatgtcttataaagaaataatttttatcgattacagcaataatccttcaccattattgcaacggttcgcgatcttatcgcgttcgattctcaacaaaaaccacaaaaaatgccgtgttatagggcagcctgccgcaccccttaccgcgtgtaaggggctgccaaaccgatgcaaccccccataaaacaaggcattcggacatcaccgaatccctggcgcggcgcgaggtgcgcggccttcccggcgccccgaactgacagcacatcttggcggttttatgcaaatttaagcgggggtttggcgggtcagaaacgtcctgcggcggcttccgtgtgacaacatgtcgcacaccgcgcgcagccaaaattgtccggcgtcacgttccgttcacaaatccccacacgcaaaaacgccccggccttcatgaataagcgccggggcgtttgagtgaatgattcaggctttgcgctggcgattgcgatagatgcccagcggcaccaggatcacggtcagcacgaaggccaccaatgcccattgcgccagggaaagccccagtacgggtgggtacggtgtgctgcagaagccatcgacctggaagcccagagggaacaccttggccagcggcaggtcatcgacgatcggttgcagcacatcgatgccgcagctgacctgggggaaaaactgggtgtacacgtgatgaccggcggcagcgacaccgccaagggcgctgagcaccaccaggccctcgaacagcgtgatcgcaccttttttacgcatggccgcgccgatgaacgcgaagatcgcgatcaacagcaaggcatagcgctgcaggatgcacaacgggcatggcgcctcgccgagtaccacctgcatgtacaacgcaccgccgatcagcgccaggcagatgatgcccagcaacaccagaaagcgccgctccctgcctaaacgcaattcgtcactcatccccgtatccctttgtttggttgtgccaatggccgcaagtttacacacaggccaccgtttaaacagaggggggttaacagcggattaatccagagaaatagaccgctgtatgtgggagggggcttgcccccgatagcagtggatcagccagcttatgtgcaaccgacctaccgctatcgggggcaagccccctcccacacctttgaccgccttattccagggcagcagccgggccaaagaattcgtagcggctttgctgctcgggtacacccagggccttgaggtggcgcttgatcgcggccatgaagcccttaggcccgaggaagtaggcgtccaggtcgcgctgctcgggcagccaggcggccagttgttcctggctgagcaagcccaccttgtccgccgccgggcttacgccatcgtcttcggtgtagcagtagaagcgcttgagctgcgggtgcttcgccgccagggcgtccacccagtcacggaacgcatggacgccgccgttacgtgcgcagtggatgaagtgcaccgggcgctcggtggccagcgcggcttcgagcatcggcagggtgggcgtgatcccgaccccgccgctgatcagcaccagcggtttgtcgctgaccgccagggtgaactcgcccgacggggtgaacaggtcgatggtcgcaccgacatgcagctggtcgtgcaggtagttggacacccggccaccggcttcgcgcttgacgctgatgcgatacataccgctatcggtcaacgccgacagggagtagttgcggcgcacttcctcaccgtcgagcaccagcttcatgccgatgtactggcccggcgcagcggcgaggatcggaccgttgtccacaggagcgaaatagaaggagatgatctcgtcgctctcgaccacgcgcttgaccacaataaacggccgcgccccacgccagccaccgggcgcctgggccttctcgtcgtagatcaccgcttcagcgccgatcaggatatccgccaattggccgtaggccgcaccccaggcactcatgacctcaggggtcgcaatctcactgcccagcacttcggaaatcgcccgcaacaggcaggcaccgacgatcgggtaatgctccggcaggatctgcagggccacgtgcttgttgatgatcttggctaccaggtcgcccaactggtcgagctgatcaatgtgtcgcgcatacatcaacacgccattggccagggcacggggctggtcaccgctggcctggtgggcctggttgaacagcgggcgaacttccgggtactcggacagcatcatgcggtagaaatgggtgatcagcgcttcaccgccgctttccagcaggggcacggtggatttgacgatggcacggtcttgggcactaagcatgggagcctcctgggcttctttactgattgcctttacctactcagtattcgtgccaactaataaaccgttaattttcaataacttaattaatgtgtagtcagtatgacttcctacaccttatagtcattaggactacaaggagtcattatgactgcgcaatcgctgctcaccaccctgctgcccctggtcgccgacctgtcccgcgaactgcccgaaggcgagcgttaccgccgcctgctgcaagccatgcgcgccctgctgccctgcgatgccgccgcgctgttgcgcctggacggcgagtggctggtgccgctggcggtggacgggttgagcgccgacaccctgggtcgacgcttcaaggtcagcgagcacccgcgctttgccgtgctgctcagcagccccggccccacgcgctttgacagcgacagcgaattacccgacccctacgacggcctggtcgagggtctgcacgggcacctggaagtacacgattgcatgggttgcccgctgttcgtcgacgaccagccctggggcctgctgaccctggacgccctcgacaccgagcgtttcgaacgcgtggaactggacgccctgcaggcgttcgccagtctcgccgccgccaccgtgaacgtcgccgaacgcatcgaacgcctgaccctgcgcgccgaaatctaccgcgaggccagcggccagcagcacaaggaaatgatcggccagagcaaaccccacaaacgcctggtggaagagatcaagctggtgggcggcagtgacctcaccgtgctgatcaccggtgaaaccggcgtgggcaaagaactggtggcccaggccatccacgccgcttcgccccgcgccgacaaaccgctgatcagcctcaactgcgccgccctgccggaaaccctggtggagagcgagttgttcggccacgtacgcggcgcctttaccggcgcgttgaacgaacgtcgcggcaagttcgaactggccaacggcggcacactgttcctggatgaagtgggcgaactgtcactgaccgtacaggccaagctgctgcgcgtattgcaaagcggccagctgcagcgcctgggctcggacaaggaacaccaggtggacgtgcgcctgatcgccgccaccaaccgcgacctcgccgacgaggtgcgcaacggccgctaccgcgccgacttctaccaccgcctcagtgtgtacccgctgcaggtcccggcgctgcgtgagcgcggacgcgatgtgttgctgctggccggtttcttcctggagcagaaccgctcgcgcatgggcctgggcagcctgcgcctgaccagcgatgcccaggcggcactgttggcctataactggccgggcaatgtgcgggagctggaacatttgatcggacgcagcgcgctgaaagcactgggtaactgtcgcgagcgtccgaagattctcagcctgaatgcacaggacctggacctgcccgatgtcagcgcagcgctggtcgaagaacccgccgaggcggtcgccctggtgaccggcgacctgcgccaggccaccgagcagtatcagcgccaggtcatcagcgcctgcctggagcgccaccagcacaactgggccagcgccgcccgcgaactgggtctggaccgcgccaacctcgggcggatggccaagcgcctgggcctcaaataacccaggcaactggttcacatgtgggagggggcttgcccccgatggaggtgtgtcagccagcccatctagcattgacccactgccatcgggggcaagccccctcccacactagacctgcttcgcctgaaaaaccgggctcgctggcttgggcttacgaaagaccaacacattgcccagcatcaccagcaccaaccccgccaacgccggcgcggtccactgatacccctcggcaaacgccgacacattcagcgccaccaccgggaacagcacggtgcaataggccgcacgctccggccccatgcgcccgaccagcgtcaggtacgcggtaaagccgatcaccgaacctggaatcaccaggtaccccagcgcgccgatataccgcgcgctccagtccatctcgaagggaatcccgcgcaccgcgcagtaagccgccagcatcgccgatccataggccatcccccaggcattggtggtcagcggcttgagcccggccttctgctgcaggctggacagcatattgccggccgagaagcacatcgtccccagcaacgccaagcccaggccaagcaaagtctgcgggctggcggtgtgccctaccagctccggccagaacagcaggcccaaccccgccaggcccaggccgccgcccatcaacacattgcgcgccacccgctggccaaaaaacatccgggcgttcagcgcgttccacagcgtggccgtggaaaacaccaccgccaccaacccgctggggatccattggctggccgtgaggaagcacatgaagttcacgcaaaacaggcacagcccctgggccagacagatcaggtgcccgcgccggttcatcacctgcaacctgcggctcaccagcaacagtgcaaacaacaccagtgctgccaggccgaagcgatagacgatggacacaggaatcgccaccacgcccaactgccatttgagggcgatccaggtggtgccccagatcagcacggtgagtaaatacaggaaaagattcatagcgggctccatcggttgagccacagtgtggcccccagcctgggatgcgctcttgcacaatcttgcgcttttgtcggccaatgggatcacagcaaccagcgcgcggagtaggatgcaaggcgtcagagagtacgaaccatgccagacctggaatccctgcaagtcttccaagcgcttaaccgctcgcccaacgcacgcctcgaagcctgcgccgagctcggtgacggcttgtctgcagcgctatggagcaaccatcacgacgcgcaggactaccaggcccccagccatcacacgttgtcctgctacatcggcggcggcaccggcacctttcgacgcgaccaacccggcaccaagggcggccccgacaaactgtgcatcctgcccgccgaacaccagtcggcctgggtgatcaacggcgaaatccgcctggcccatgtgtatttcagcccggagcaattcgcactcggttgcgtcaccctgctcgaccgcgaaccgcgcgccctgcaattgcgcgaaagcacctttctggaggacgccggccaggcgcgacgctttcatcagttgatagcgctgaactggcacgaacccgccgagcgcctgctgactagcagcctggcccatgaaatgctcagccacacgctgctcagccaagtgggcgcacgcgacgggctgcgccttaaaggcgggctggcggcgtaccagcggcggctgttggtggagtacatcgaccagcacctggaagacccgatcagcctaggccaactggccggcctgtgcgcactctcggaataccatttcgcgcggatgttccgccaaagcttcggcctgccgccccatcagtacctgctggcgcgccgcctgacccgcgcccaggcgctgctgcgcagcggcgcgctgcccttgagtgaagtcgcgttgatctgcggtttctccagcgccagccacttcacccatcgcttccgccaggccatgggcgccacgcccggcgaataccgccaagccttctacgcctaggtcatcaaccccagggtcttggccttggccactgcttgcgtacgccgttccacccccagcttgctgtggatgcgccgcgcatgggtcttgacggtgtgcagggagataaacaggcggtcggcgatttccaggttggagttgcccagggcgatcaattgcagcacttccagctcgcgctggctcaagggattctctgccgcgcccgacacggccgcctgaggttccatgcccaactcactgagcacccccggcgagcgcaatcgcagttcgcgaatcgcttgctgtacctggcaacgcgccgccagctccagcccggtttgcagcgagcgacgcgccaggaccgagtcgcccatttgccaagccacctcccccagcaccaggtgcagttcggtttccaggcagagcatgccgcgttgatgggttgcctccagcaaagccgtcagccgcgccaccggttgctcggcgcagcccagcttcacttccgccagcaccagcaggtattccaggcgcgggatcagttccagggtggccggcggcgcctgtttggcctggggaccacgaaagtggcgaagcacacgacgcaccgcttccaccgtcaattcggcgcgcccctgctgcaaccagaaatgcccactgaccaacagcaacactgcgcggtacaccgtgtcggggacctggcgctgttgcatcaagcgttcggcctcgcgcagttgcacaaaggcctcggcgtagtcgccacggttggcggccagcagggccaggccgagaaacccgtagagcacgcgcttgtcctggctgtgcaggcacatcttcaaaccggtctcgaagcactcggcggcaaggccgtcctggccttgacgcaacgccaggtgcccacggcgcagggcgatgcgccccaccagcggcccggctttcacacgttgcttgatcaacatcgcctgcacactctccagcaggctctgcgcccgatacggggcgccgcgctgctccagcaactgcgcgtgatccagttcaagcaacgcctcaagcagcaacgacccatgggcgcgggccaggcacaacgcttcgcggctcagcgcctgggctacgtccagttcgccgcgcagcagtgcttgctgagtgaggcccgacaggcacatcagccgcgacgtccaggcgctgtcgggcaaggcttgcagcgcttcgaggaaatgcgcgcgggagcgttcggcatcgccgcccaagtgcagcagccagccccactgtgcctgccagcgcgccagcaggtagcgttgttgcgccgccgtcggttgcggcgcgaaccgtgccaactggtcgatacattgcgcggcctggtcgaagcgcccggcgaacagcaacgccgccgtcaccagccccaccagttgcgccgagccgagcatcaactcttcaccatgctcttcatgcaaacgcagcagcaatacggcgttctgctggcggaacaggtcttcgaaactgaaatgctgcaacaggctgactgccacctcgtactcttcggccagcagcgcgtgctcgaacgcggcctgccagtcctgttcggcggtgaaccactggcaggcacgccgatgccaggaacgcttggccggccaggggtcatcgcgtatcagccgggcaagcggcgggaaaacctgcaaccactcggtatcttcccacggctggataaaggcgccgagcgcctgcaactcgcgcaggtagtgatcaccgtcgccaaagccgaacaagtgctcgcacaatcccgggttaaagcgtggcaggtgggccagcacgcgccaggcttccgtcagctcgggcggcaaggtgctgaagagttcgtgctgcaagtaatcgagcaaggttttctgcgggtggccatcccccagcaacgcaatgcgcacgccggcgcaccaaccggcgctgaattgccacacgctgtccgctgacggccccagcgggagcagttgctggatttcttcaagggtgaacgccaactcggcgcccccctccagcaattcatcgtcgagcaacaggcgcggccagttgcaggctggacggcgccgcgcgcccagccaccaggtcagcgaagggctgctcgccgtgagcaggcgatcgagcaaggcatcggtttcgggggtgggcaagcgacagaaatcatcgaggaacacccatgccgatgttggccagcggccaagatctgccagcagcgtggcttcatcgctgaacgccaagccgaggttttgcgccaggcgccggcaaaggtcgagggggctcagggcgacaccattgagcggcaaccagtacacctggcatcccgctggcgcctgcaacgcacattcggccagcaacgcactcttgccgctgccgccgggggcgcacagcaacttgaccctgaccggcgctgccagcaacggcccggccaggcgtgggcgcaacagatggtgggcggacagccgaggcatgaatccaggacggtccagacagcgtgtcatggcggtcattgctgcatcctgcgttcttattgttatgcaacgtggcgtctaccctagtcctgtggttggtggttgttgaagaagtattcagcggggtgattggcgggcataaaaaagccgggagcccgaagggtcccggccaggtcagagggtgatcagcgcacgccttcggccctcagcgcagccggggtgtaatccgccgccttggccgcaaagccaaacacgaagctgctcttctcctcgttcttcatgcccagcgcgatgtagcgcccggcgatgatgtcgtacagggtttccacggtgtaggccggggtctggtggtcgtagtagaactgcgcatggccttcggcgacccgccacagttggccacggccgtcatagtgatccaccagcgccacctgccagctgtcttcgtcgatgtacatgtggcgcttggcgtagatgtgccgctcactcggcttgaccgtgcccaccacttcccacacgcggtgcaactcatagcgggtcaggtcctggttgatgtgaccggccttgatgatgtcgtcgtacttgagcgttggctggtccagcctgtagctgttgtaagggatgtacatctccttcttgcccaccagcttccagtcgtagcggtccggcgcgccggagaacatgtcgaagttgtccgaagtacgcaggccatcggaggcggtgcccggtccgtcgtacgccacttgcggcgcccggcgcacacgacgctgcccggcgttgtagatccacgccaggcgcggttccttcacctggtcgagggtttcatgcaccagcagcacgttgcccgccaggcgcgctggtgccgtcaccgactgtttgaagaaggtcagtacgttggccgctttggccgggtccatgtcggggatcagttgcggcaccgctacttcttcctcaaagcggatcggcgtgtagctcccattggtctgcggggtggcctgggtgatgatgcggcgcaggttgccgccgtggtaacgggtgatgtggttccacagcacctccacgccattcttgggaatcgggaacgcgtagtagcggttgccggtgaacccttcgaggccgttgccatcgttgatcggcttgacgttcaacgcgctgcgcttgatcgattcatagatctccggcggcaggttgacggtgcggtgggtcgggtacaccgggatcttataggtctcggggtagcgcttgaacatggccacctggccgtcggaaagtttgtccttgtacttgtcgacggtggccgcggtgatcacgaacagcggtttttcactggcgaacgggtcagccaggaagcccttgctgtccacggctccggcgtttttcgggatgcctccagtccaggcagggatcgagccatcggcgttgccggctttctcggcgcccaccggggtcaacgtagtgccgagcttggccgcctcttccggggagaccgcggccatcacgttgacggccaacaggctgagggccattaccgcaattatcttacgcatagagtgttgtccttccttaagccagatcagaagttcgcgccgaagctgagggcgatgaagtcgcggtcggtgagggtgttgtagtcgccgccgaaaaagtcggtgtagctgaggctggcggtataagtgctgcggtaatccgcatccacgccgacgctgatggccttggcgcccttgttgaacaggccgttggggccgtagccggccacgtcatgggaccaggacaggttgggcttgaggttcaccccggcaatcgcgttgttgtagtcgaggatcgcccgcgcgcggtacccccaggagttggccgtgacaaaaccgtcggtgtcaccctggaaaccgtaggcgccatacaccgagtcgcggccataacgcagcttggatttgtcctccaacccgccaacgtgcacgtaggccgcttcgccgaccagggtcaggcgttcagcgcccagtacctggtcgaagaattgggtcatggtgctttggatctgggtgatttccttgcggcggtaacctttgttgtcgtcaccgaagttgctgcggatcggcgaggccagttgcccggcgaccgggttgatcagggccagggtcaggtcggtggtgttgagttgcaccggggcattggggcgatagctgatctcgccggtccacgccgtgccggtgggcaatgtggtggagaaactcgcaccaaacaggcggatatcttccgggtagtccaggtagtactggccacggccaagcatcaggctctggaccagacctgcgccggagccgggcgcgatgccattggctgcaccggcgatcgcaccgagccgggccaggctcgtattgttggtgatggtgcccacggtcggggtgcggctgtggtagttcatgaaatacaagccgtattcggtgtcatcccccaaccaacgcaacgccgtaccgaattgaccactgtcacgcgcgtcgcgatcctgcgcacgctgcacgatcaccccttcacgagtcacttgaaagccttgcccaaacgcggcggcgacaggctgcaacggcgcaatcgccgggttgcccaccgtgtagttgccattacagccatgggccgccacatccccaccaaagaatgtgccgcagttatccagcacggtgttttcccagttcagctggtagaagccttccacggtgagttggttggtcaggctctgggaggcgaacagcatgttcaccgggatcagcccttccttgatctctgcgcccgggcggcggaaggccgaaacgtcgatggggttgatgctgttgatcgagttaccgataaaggtgctctcgccccagctgaccacttgcttaccgaggcgcacgttgcccggttggtcgccaatcgaatagttgtgatacacgaaggcatcgagcaattcatagccggatgaacgcgcgccctcgtcacgatggtgattgctgatctgcttgaactcgcggtcttcgtcctgcaactcgaagtcgtaccagtacttgccacgcacgaagacgccgctgtcaccgtacttgagttcaaggtcgtggatgcccttgaagatcttggagaaggtctcgcccttcttgaagttcaggcgcccgtcatccccggtagacgcctggccagtaccgccgttgacggtgcctaccagttttttgtctgcgtcgcgcatgccccaactcgcgcccaccgacagcgaggaatcgaattgcccttcgatctcgccaatgttgaacgaaacagcctgtgcctgggcacagcaccccaacgcaaccgcagcggccagcgcctgtggcctgaagatggcgcgcattgttgttcttgtcatgcgtcttccccggtgagtgacagaaggccccaccctactgccgcgtctcaggagcgataagcgcaccaaggagggattcgtgttgtcgctcgaaaggatgacaaggcgctctggccggggtctggccgggggcatgcagcgggtggatagggggttatcaggggaatggatagcacgtacggacactattgccgttttagtaacagtccttgtcacgaaccggcattactcatcctgttacaaacgactattcttagcgggctttcagggcaaacggcccgcttcccccgaccggaagaaaagccagattcaaatagattgaggcctgttttcaatctgttaccggtgttcactgacgttgatttgtcgctccttgatccaacgtctgacttcagccgctgcgtttgcagcggcttttttttgccctgaataaaacggggcgccatcagcgccccgcaggattaaagctttttcaagcaacgatcacaggctgtacttctgcaagttggccatcatttccttcaacgcttcgatgttgtccttggggtgtgccgcgccttcgaagtcgcagatctgctgccagtgcgccgccacgtcttcgggcgagaaccccgcctcagggtcaaagcccacacccaggctgcgttcccagcgggtcttgccgatccaaccgccgcccacttcaaacagcccggaggtttcctggcaggcttcactgcccaggtacaccaccagcgggctgaccagttccggtttgaggcgttcgaacacctgcggcgggatcaagccttcggtcatgcgtgtaccgccggtgggggcgatggcgttgaccaggatgttgttcttgcgtccttccagcgccagcgttcgggtcaggccgtacaggccgagcttggccatgccgtagttggactggccgaagttgccgtagatacccgaggtagacgcggtgaagatcacccggccatacccttgctcgcgcagatggggccaggcggcgcgggtgactttgtaggcgccttcgacatgaacccggtaaaccaggtcccagtcgctgtcgtccattttgtggaaggtcttgtcgcgcaggatcccggcgttgttgaccaccacatcgatacggccgaaggcgtcgagggcgttctgcacgatcttgtcaccgtcggtgacagagtcgtggttggcctcggcgataccgcccgcttcgcgaatctcggccaccacccggtcggcggcggacgcattggcgccttcaccttgcgtggaaccgccgagatcgttgaccagaaccttggcgccatgcctggcgaacagcagcgcatgggcccggcccaatccgccaccggcaccggtgacgatcacgaccttatcctggaactgcactgattcactcataccgaactccaatggcgacaatgggaatgggtcgagtgtcaggcaccggggcgctggtcacaataaagccggccagggctgaatggtgctcgataaggctgagggataatcgtccgatcaggaataggccattcgcggagccgagtggccgatgcgatcacgaaacgccaggtaatgcttgagcacctgcaccggcgcctcgatctgcgggtagtgaccgatattggccaatagcaccgtgtcggcgtgaggcaccagttcgtgataacgcgccaccatgtgagcaccggagatcgggtcgatctcgccgtcgatcacccgcagcggcacatcagtgtgttgcatcgccgccacccaacgctcacgcaggcgtcgacgctgggggatgtaagcgatgagtttgtgcaggatgcgcgtgccatcgttgcggtcgatcaggctccagaagtcgtccagggcgctttcgctggggcgggtgttgggtccgaatatctggctgaaactgttggccagggcattgcgcccgaacgcacgaccgatcatccagcccagggggctgagcagcagcttttgcaccagcgccggacgatgggtttccgggaacaacccgccgttgagaaacacgcagctggccatgtgaaagcggccttcgcagtgccgggccagcagttcctgggccacgctgtcgccatagtcgtgggcgagcacatgcaccggctgatccacacgcaggtgctccagcagcgcctgttgcaagtccgcctgttccaacaggcaataaccatggtcgaggggtttggccgagtcgccaaaaccgagcatgtcgcaggcgatcaccaggttgcgttgggcaaggggctgccacaggtaatgccagtcccaactggcagtgggaaagccatggatcaacaataagggttcgccctgccccgccacccagtagcggatagtgcgtccgttaaagtcgaaggtctggctgcgtttgcgccagacactcagcgggatctcggcgagaggcatcaggttttatacccaggatcgaggctgtccaatttacgcagcaacgccggccacgcaagcgcgccccccataccttgcgcactctttgtgacagccgccaccatcgccttggcaccggcgaggatctgcggcccgatggggatcaaatccgccccgccgctctgggccagcacctggatatcgcaggcgcgctggaaggtaaacatcatcagaaacgtgtcggcgatggtgctaccgcaggtcagcagaccgtggttgtgcagcatcaggaaattattttggccaagatcggcctgcaaacgggccttctcttcgtggttcagcgccacgccttcgtaggcgtgataagccaggctcgacagcacgaagatcgattgctggctgatcggcaagacgccctgcttctgcgccgccaccgcgacaccggcagcggtgtgggtatgcagcacgcacgtcacatcgtggcgcacttcatggatggcgctgtggatggtgtagcccgccgggttgatctcgtaggggctgtccatcagcttgttgccggcctggtcgaccttgaccaggctcgacgcggtgatctcgtgaaacatcagcccgtaggggttgatcaggaaatcgtcggtgcccggcaccttggccgagatatgggtgaagatcaggtcatcccagccgtgcatcgccaccaggcggtagcaggcggccaggtcgacgcgggtctgccattcggcggcgccgacctgatctttgacattctgtggcgatggaacgggggctagactcacggcaacgacctccttggcgcactttcttattgttttttgagtgatgggccagtctagtcagacgccctgcccgccgtagttgccttggcagccagcttgatgaccgtgcgggtcagccttgagaatagtttaaatccgtgcaagcgacgtcagagaagtgccgccaataaaggcgcggcgaacaggttgagcaagccggtcaggaccatcaccaggccagcaaccgagccctcttcgccgcccacttcatgggcccggctcacgcccgcaccgtgggcacccacgccaaacagcgcaccgcgcgccagcggcgtacgcaggggtagccatttgagcagcacaccgccgagcatcgccccaaacacaccggtgaacatcacgaacaccgccgtcagttcaggcacgccacccaggtcggaggacaccggcatggcgaacggcgtggtgatggagcgcggcaccagggacagggtcacagagctgtccagggccaacgctttggccaagccaaatgaggtggcgatggacgccacgctgcccgccaccatccccagcaacaacgccgaccagtaacgcgccagcaaccgccgctgctgccagatcggcacggcgaatgccacggtgacggggccgagtaccagcatcagccagtgagtatcggcggagtattcggcgtaggccgtgttcatcggcacggccaccgccagcaacagcacgggcaccaggatcagcggcgacaacagataacgcccggtacggcggtagatccagcggctgaagacatatgcgcccacggtcaaggcgagccagaacaccggcatcagctcaagcttcatggcgcagcctccagcggcacaccagctccacggtgaacgcggtcaccagcatcaccgccagggtgctgaggccgatgaccagcaggatgcgccaaccgtcattgcgcagcaggccgccgtagtccagcagactcatcagcgcagggatgaagaacagcagcatttcagccatcagcacgccggcccccagttgcagggccgccggtttgaccaggccgctggcgaagaccatcaacaacaggcccaggcctaccacaccgccgggaatctgccacgcccaccacacggccagttggcagccgaacaggtaaatggccagtagcacgaccagttcaatcaacagacgggtgaaacgtttcatgggctttgggtcctcgcaggccttcattttaaagaggcatgtcccatccccacagcgaattgttagactgccagctattccaaatcggaatttcgcacatggaattcaaacagctacgcagcttcgtcgaggtaatccaccgcggtggctttacccaggccggcaaaaccctgcatatcagccagtccgccgtcagcaaacaggttgcgcaattggagcagagcctgggcacgcccctgctcgaccggatcggctcgcagattcgcctgaccgccgccggccaagtcgtcctgcaacgcgccgaagccatgctgcgcctgcaaaacgagctactcagcgagttggacgatatgcaccagttgacccgaggcgagttgcgccttggcctgccattgttggccggtgatacgttgttcgccgaactgtttgccgaataccgcaggcgttacccgaacgtgaccatccagttgctggagggcggcagtcgcaatatcgaacaggccatcctgagcggcgaactggaagtagggggcagcctgaaacccagcgacccggcgtttgcctggcaagcgttctgcgatgagcccctggacgcgctgttgccgattgatcatccgttggcggaaaacgcccaggtacgcctggaggaattggccgacacgccgttcctgatgtaccagcgcagtttcgtgctgaacgaccgcctgatgcaggcgtgtgagcagttgggttttacgccgaaggaaatcggtcgcagtggccaggcggacttcctcgccgcgctggtcgccgccggccagggcgtggtgctgctgcccagcgtggtcgcccgtgggctggtgcgaccgggggtggtgcgcctgacgctcaaggcgcccgactacttgcgctgggacattgcatttatctggcgtgacggcgcctatctgtcgaaagccgcccaggcctggctggcattgctgcgtgagtttccggtcaagcgcgcagtgcagtgaccagctccgccagccacggttcggcgtcggcttccggggtcacactttcgctggcgtccaggcgcaacatcggcagtacttcgcgcacgcccagctcgccaaacagctcgcgcatctgctcgccaccaccgcagaaggtgtcgccgtagctggcgtcacccaggccgatcaccgcaccgggcaggccgcgccaagcggcgggcagttgatcacgaatcgttgagtacaggggttggagattgtcgggcaattcgcccatgccggtggtggacgtcaccgccagaaacgcgtccggcgcaaacgcctgcacatcggcgaggctggcgcgagggttgtgccaggcctcgaaaccggcggcattgagaatgccgacagcgtgacgggcgacttcttcagccgtgccgtagaccgagccggaaaggatggcgactttcatcaatctgatcctgtagttgagcgaaagcctgggatattaacagctgccacaattttttcggcgcaccccgtgcaacattcagggcttgccataaactccacagttcaaaaacaagccatggaccgctcaatgattaacgccaagctgatgcaactggtcatcaacgcctccaacgacggtatcgtcgtcgccgagcgcgaaggcaaagacaagccgctgatctacgtcaacccagctttcgaacgcctgaccggctacaccctggatgaaattctctaccaggattgccgcttcctgcagtcgggcgaccgtgatcagccagcactgatggcgattcgagaggcactggaaagcggaggtgcatgccgggaaatcttgcgcaattaccgcaaggacggcagccatttctggaatgagctgtcgctgtcgacggtgtacaacgaggccgacaagcagacttatttcgtcggcgtacaaaaagacgtcacgttgcaggtcaaggcccagcagcgcgtcacccaattggaaagcgaactggcccaggtcaaggccgaactggccgcgctcaaagcgacgagcggatctaacaaaatttaggaagtgcgatcattaggggggataatggcattttaacacccctaatgagcacgagtgatgcaacgcgatgcgctcctgacccaggacgagctggatttcattcagaacatgcagcacaacccgcaactcaacctgcgggatgcttcatcgagcctgaccgttaacggcggcgcacagattcgcgacttgcttacccggctggccgctcacgaccacctcaccatccaggcacaattcgataatcagcaactgaccttccccttgcacctggtggaagacgagttcaatgccgtgcacctgcgtttgggcgtgccaagcattttcgaagacgggccgatgattcgtccctggcgcctggccctggaaaccccggtggcgctggagaacatcaggggcaacctcagtacgttgtgggtgcatgaagtgtcgttcaagggggtgctggtggagattcgcgggcgggtcaaaccaccgaaaaccttttccctatggttcagcccatccggctacgagcgcatcgccttgcgcggcacattggagcgggaaaccgcccgaggcttgttcgcctatcgcctgagccagagtgatgcggatgaaaccgagcgtctgcgccagttcatcctgcatcagcaccgcctggtgcacccgcacgtgcacgcctgatttcaggtatccaggttgccgctgaggaactgctgcaggcggcgctgcatcaagcgcccgtcactgcccaggcaaccgacgggcgagcccacaaggtctttttccgccaggtccgaagcggcgccggcgatcagcaatgggcaatccagggtctgcgccaagcgattcaagcgtcccacccgctcatgattgtgtgcatgattggaaaacacgatcagtgcctggggatgggtcttctcacagatcagcgtcaattcgtccagcggctggccgaccgccaggaccttcaccgccaagttctctcggctcatcagtagcgcagccaccaacaattccagtttgcggcactcgccggggatggccgcaagcagcacccgcggcaacggctccgcacaggccagttgcaggcgctgcaaggcccggactcgcaggaagttatcgaaaaacaaccattcgctggcctgaccgaaccggccctggtgacgcaacagctcgtgccaaagcggcatcaggatgtcttcaaaagccacgctgagggggtaggtggcaagaacactggcgtactggtgttccaaccgtcggtcgtcgaacgcgctgacagcctgcatcatctgtgcctgccattgagcccagtccccgccctccagcgagtcttgctcggcgcgaacagccagggcttgctggtcgtcacgggcgagaattttcccaaccttgctgaccgccacaccgcgctcgatccaatcgaggatacgattgacggtcgtaatatcagccttggaatacaaccgatgcccgctttcggtgcgtacgggctggatcaggccgtaacgtcgctcccaggcacgcaaggtgaccggattgacgcctgtcattctcgagacttcacgaattggaaacagcttatcggaatcggtcgattcaagatgcaaattgctatcatgggaggcagtgatcacgggcattggagaccaaaaaaccaacggtaaatagaacctcatttaacgcccttagacctgtctttttcaaggtcccagcttattcggaccaatgcctctggcgtatttgtgcaaaacaggaataatccttgcctgtttttacagagcggcaccaccccgccgctttgtttgtgcgccccctacccggcccggcgcacctgaatatttggagatacacaatgtctacctcccccgtcaccctgatggttgcgcgtcgcgtggccaagggtcgctacgaagaattgatggcctggctgcgtgaaggcgagcaattggccacggattttccgggttacctgggctcaggcgtgcttgccccgccgcccaacgatgatgaattccagattattttccgcttcgccgatgaaaaaaccctgcatgcctgggagttttccgcgtcccgcagtgcgtggctgagccgtggcagtgagctgtttgccgacccgtccgaacaccgcgtgcgcggcatcgacggctggttcggcgcagtgggcgcgcgcccacctcgctggaagcaggccgtagccatctggctggcgtttttcccggtgtcactgttgttcaattttgtgctggggccgctgctgagcgaactggacctggcaccgcgcgtgctggtcagtaccctggcgctgacgccactgatggtttactggttcatcccgctgtcgacccacctgttggcaaactggctgcatcctgcccctgcaccgcgcaaggctagcgaagccgcggcgtgaatacaggggcgctcggtcgctggtatagtttcaacctgccagcgactcgagcctcccatgactgcaacaaacgccccgatcctgatcaccggcgccggccagcgtgtcggcctgcattgcgcccagcgcttgctggatgacggccacccggtgattttcagctaccgcagcgaacgacctggcgtgcaggtgttgcgcgagcgtggggcgatcgcagtgtttgccgacttctccagccaggccggtatcctcgcatttatcgctgagctgaacacccatacccagagcctgcgtgcgatcatccacaacgcctcggcctggatggcggagtcgcccgacgacgaaagccgcgcgtttaccgacatgttcagcgtgcacatgcttgcgccgtacctgatcaacctgcattgttcacccttgctgcaccgctcgacaccggccgacatcgtgcacatcagcgatgacgtggtgcgcaagggcagccgccagcacatcgcctattgcgccaccaaggccgggctcgacagccttacgctgtcgtttgccgcgcagttcgcgccgttgatcaaggtcaacggcatcgccccggcaatggtgatgttcaacgacggcgacgacgcgccctaccgcgccaaggtactggccaagtcggcactgggcatcgagcccgggcccgaggtgatctaccagagcgtgcgttacctgctggacaacccctatgtcaccggtaccaccctgaccgtcaacggcgggcggcatatcaagtaagccgtttgtgaggatgttgtatgaccttatccctgccccaccattaccgcgagatcctcaagggcttgggcgaagaccccgagcgcgaaggcctgctcgataccccaaagcgtgccgccaaggccatgcagtacctgtgtcatggctacgagcagaacctggacgaaatcgtcaacggcgcgctgtttgcctctgacaatgacgagatggtgatcctcaaggacatcgagttgtactcgctgtgcgagcatcacctgctgccctttatcggcaaggcccatgtggcctatatcccaaccggcaaggtgctcggcctgtcaaagctggcacgcatcgtcgacatgttcgcccgccgcctgcagatccaggaaaacctcacgcggcaaatcgccgatgccatccagcaagtgacccaggccgccggtgtggccgtggtgatcgaagccaagcacatgtgcatgatgatgcgcggtgtggaaaaacagaattcaaccatgaacacctcggtgatgctcggcgcgtttcgcgagtcgaacaccacgcgcatggagttcctgcaactgatcggacggagcaagtagcaatgccacaacttcaaccaggcatggcgcgcatccgggtcaaggacctgtgcctgcgcacctttatcggtatcaatgaggaggaaatcctcaacaagcaggatgtgctgatcaacctgaccatcctgtacgccgcccaggaagctgtgcgcgacaacgatatcgaccacgcgctgaactaccgcaccatcaccaaggcgatcatcgcgcatgtggagggcaaccggtttgccctgctggagcgcctgacccaggaactgctggacctggtgatgagcaatgagtcggtgctgtacgccgaagtggaagtggacaagccccatgcgttgcgctttgcggagtcggtttcgattaccctggcggccagccgttaacccctgagatttgcgtgaaccttatgaacgaccaacaacgactcgaactcgaagccgccgcctttcgccggctggtggcgcatctggacagccgcaaggatgtgcagaacatcgacctgatgaacctcgccggtttctgccgcaactgcttgtccaagtggtacaaggccgaggccgacgcgcgccagatcgagctgagcctcgatgacgcccgtgaagtggtgtacggcatgccgtacgccgaatggaaaacccaataccagaaagaagccagcgccgatcaacaggcggcgttcgccaaaggaaaaccccatgactgatttgaacaccctgcgcgccagcctcaacagcggcgaacatgtttttgccgataccctggcgtttgtcgctgccggttatgagtaccagccacaggcgttcaccaatggcgaggtagagaatgccgcagggcagaacgaagggtcgtgcaagacgttgggtttggcgctgctggaaggcttgagcgatcaggaagcgctgctggcgtttggtgaacattaccgctcagtggtggcgacgcctgagggcagcgaccacggcaatatccgcgcattgatcgcaaacggcctggccggtgtgaagttcaccgcccagcccctgactcgcaaatcctgagccagacctgaatcaaaatgtgggagggggcttgcccccgattgcagcgtgtcagctaatgaatacctggctgatacaccgctatcgggggcaagccccctcccacatttgtttgcggcgttggttagaacgcagcgtctttcagaccatccaggtaacgctcggcatccaatgccgccatgcaaccggcgccggccgaggtgatggcctggcggtagacgtggtcggccacgtcaccggcagcaaagataccttcgatgttggtcgcggtggcgttgccttcacggccgccctgcaccaccaggtaaccgtctttggcttccagcacgccctcgaacagcgaggtgttcggggtgtggccgatggcgatgaacacgccgtcgactttcagctcgtcgaagctgccgtcgttgttcttcaggcgggcacccgtcacgcccatgttgtcgcccaggacttcgtccagggtggcattgagcttgaggatgatcttgccttcggcgacacgggcatgcagcttgtcgatcaggatcttctcggcgcggaaggtctcgcggcggtgaaccagggtcacggtgctggcgatgttggccaggtacagcgcctcttccacggcggtgttgccaccgccgaccacggcgaccggtttgttgcggtagaagaaaccgtcgcaggtcgcgcaggcggaaacgcctttgcccatgaacgcttcttccgacggcaggcccaggtagcgagcgctggcgccagtggcgatgatcagtgcgtcacaggtgtacacgccgctgtcgccggtcaggctgtaaggcttcttggagaagtcgacctggttgatgtgatcaaacacgatctcggtttcaaagcgttcggcgtgttctttcatgcgctccatcagcaccgggccggtcaggccgtggacgtcgcccggccagttgtcgacttcggtggtggtggtcaattgaccgcccgcctgcatgccggtgatcagcagcggcttgaggttggcccgggcagcgtagacagcggcgctgtaaccggcagggccggaaccgagaataatcactcgcgaatgacgggtatcagacatgactcactcctatcgaccgcccggactacaaggcggctggaataaaaaagggaccacgaagcacttggggaaggcttgaactcgcaggccctgaaaaataatgggtgcagcgtatcgaggggggcaagattaaggaaatacggaataacaatccagctcatagacggtcactatgtagttggcccgactgatcgacgggtttgttacggctgatgtcgcggctttcgcctgcgatgtaaagccggtaaggtcggcgcgttcgcccttttgctcggagttctccatgcctgcccctgctctttccggcccgcaatacctgcgcgaaggcctcaaactcgtattgagccccggcctgcgtctgtttgtgctgctgccgctggcgatcaacctggtgctgttcgttggcttgatctatttcgccggtcatcagttcagcctgtgggtcgatcacctgatgccgacgctgccgagttggctgagcttcctgaactatctgctctggccattgttcgtggtgctcgtggtgttgatggtgtttttcaccttcaccatgctcgccaacatcatcgccgcccccttcaacggctttctctctgagaaggtggaagtggtggtgcgcggcaccgatgacttcccggccttcagttggggcgagctgatcgcgatggtaccgcgcaccctcgcccgggagatgcgcaagctgggctacttcctgccacgggccatcggcctgtttatcctgtcgtttattccggtggtcaatttggtcgctgcaccgctgtggttgctgtttggcgtgtggatgatggcgatccaatacatcgactacccggccgataaccacaagctgggctggaacgagatgctcgcctggctgcgccagaagcgctggcagagcatgagtttcggcggcatcgtctacctggtgttgctggtgccggtggtcaacctgctgatgatgccagcggcggtggctggagcgacgttgttctgggtgcgcgagcaaggcgccgaggcgatggcagcgcagcaaaaggtgactcagtcataaatccatcatctcgatgacacaatgacgacatggcccacggtgacactgtgggtcatgacgacagcttcgcttcacatcacccttatcaccgaaaccttcccgccagagatcaacggggtggccaatacccttggccgcctgtgcgaggggttgcgggcgcgtggccatcaagtcgagctggtacgcccgcgccagggcgtcgaccagagccgccccagcgacgacgcgttactgctatgccgtggctggccgctgccgggatatccgggcctgcagtggggccagtcgtcgatgcacaagctgctgcggcgctggacgcgtcagcgtccggacgtgctgtacatcgctactgaaggccccttgggcttgtctgccctgcgtgcggcccggcgcctggggatcagcgtggtcagtggctttcacaccaacttccagcagtactcgaaccaatacggcttgagcatgctgagccggatggtcacgcactacctacgctggtttcataaccgctcaaccctgaccctggtgcccagcgccagccagcgcctggagctcgagcgccggcatttcgaacgcttgggaatgttgtcacgtggggtggacagccaactgttccatcccgcaaaacgtgacaatgcgctgcgggaaagctgggcattgaacagcgaacagactgccgtgctctacgtgggcaggctggcgcaggagaaaaacctgggcctgctaaagcgctgcttcgaaacgttgcaagacacctacccaatgcgccagatgaaactgatcatcgtcggcgatggcccacaacgcgcggcgctggaaaaggagctgccggaagcaatcttctgcggcaccttgcgcggtgaagaactggcgcggcattacgcatcgggcgatgtgttcctgttccccagcctcaccgaaaccttcggcaacgtggtgttggaagcgatggcatccgggttgggggtggtggcctacgaccaggccgctgcaacccagcatatccgccacggctacaacggcgtgctggcgatgcccggggatgagaacgcattttgcgaggcagccaactggttgctggaagacgccgaaagcttgcgccgcatgcgcctgaatgcccgccaacacgccagccgccagggctggccggcgattatcgagcagttcgagcgtcagctgcgtggggtttgcaaggacgggcatccggtgcccgccctgtcgccgcttacaccagggtcgtcaacgcctcacgactgaaaggcaggatgtcgccctcgcgaccctcgcgcaccttcaacgcccaatccgggtccaccagcagggcacggcccacggcgaccagatcaaactcgtcgttgttcaagcgctccagcagcttctccaggctggccggttgcgcgactttgtcggtgttgaccatgaactgcaggaactcgccatccaggcccacgctgcccacggtgatggtcggcttgccggtgagctgacgggtccagccggccaggttgaggtcggaaccttcgaattccggctcccagaaacgccgagtggagcagtggaaaatgtccacacccgcatcagacaacggcttgagaaactcgcccagcgcttgcgaggtttgcaccaggcgcgcggtgtaatcctgctgtttccactgggaaaagcggaagatgatcgggaaatcagggccgaccgcagcgcgggtagcctggatcagttcaatggcaaagcgtgagcggttggccaggctgccgccgtattcgtcggtacgctggttgctgccttcccagaagaactgatcgaccagatagccgtgggcgccgtggatctccacgccgtccatgccgatgcgctgcgcatccttggcggcttgggcgaaggcgttgatcacatccttgatgtcttgctgggtcatgccatgcacgacgacgttgccatccttgagtttttccatcgggccgtaggccggcacgctggcgtcaggttcagtgccgatacggcgcacactacctacgtgccacagctgagggacgatcttgccgccttcggcgtgtaccgcgtcgaccactttcttccagccggccagggcggcttcaccgtagaagtgcgggacattggggtaaccgttggaggcctggtggccgaccactgtgccttcagtgatgatcaagcccacaccggcggcggcgcggcgacggtagtactcgatcactttggagttgggcacgccacccggcgagaacgagcgggtcatcggcgccatgacgacgcgggtcgacagttgcaatgcaccgagctggaagggtttgaacaaggcttggacgggcatgggggcactccacggaagacggggtttatgatgtggataatatggggagtgcagcatgctgggtagcactattgatctgggtgattaaggggtaaaagtgatggccggttggggctgctacgcagcccagcgcgggacgagcccgctcactacaactgcggcgctcagctgagggctttttcgatggcctggacgatcgtcgggtcatccggtgcggtgcgtggggagaagcgcgcgagcactcgcccatccttgcccagcaggaatttttcgaagttccaggtgatatccccaggaaactctgcgccctcgcctgccagcaggcggtacaactggtgacggtcaggaccgttgacctccagcttactgcccagagggaatgtcaccccgtaattcaggctgcagaactcctggatctcttcttctgtccctggctcctggccagcaaactgattgcacggcaggccaagcacggtaaacccctggtccttgtactgctggtagaggttctccagcgcggcgtattgcggggtcaagccacatttggaggccacgttgaccaccagtaccacttgccccttgaagggcgccagcggcagctcttgtccgtccaaagctttgagtttcaggtcgtggaaagcactcatgacgaactccagatatcccatgttcttcgcattgcggcgcttcgagattacaactcacaagcctgcaatcatagacgccgattgcaaaacgcgcctgcgagttactgagcggtaggccagggcagaatcggaatcgccgtcacggcattctgcgggctgccttcgatcaggcggtcgctgtacaccaggtacaccagggtgttgcgcttcttgtccaggaagcgcaccacctgcatggtattgaacaccagggaggtgcgctccttgaacacttcgtcgccgtccttgagttcgcccttgaagcggatcgggcctacctgtcggcaggcgatcgaggcttcggcgcgatcttcggccaggcccaggccgcctttcacgccgccggtcttggcgcgcgacaggtagcaggtcacgccatcaaccttggggtcgtcaaaggcttcaaccacgattcggtcgttggggccgacaaacttgaacacagtggacacctggccgatttcctcggccgaggccagcaacggcatggccagcagcaggccgaacaatcccttcatgacacgcatggtgtattcctttggttagaccaggatcaggttatcgcggtgaaccagctctggctcagccatgtatcccaagagtccgacaatcgcatcggaggattgtccaataattttctgggcttccagcgcgctgtagttggccaggccacgggcgattcacgaccgtcgggctaggaaaagaggcgacgcggctagattgaactagccctccatagcatatttttctataagaacaagaaaatataaatcgtctagaaatataaacatttggttaatgcaatactttacagaaatcaaaaacacacactaaaacaatgagttacacaaaaaaacaaaatgataaaacataaggactacaagcgaaaaagataaaagccacacaacaataagaattaggctataaaaaaacgtcacagaactcacatcctcgaaacagcaaaaccgcccaaaacatccaaagatatatttagttacatgacgcaacttgcccagacaactagcacaaacaagtatgtaaaacgcaaattcagcaaaaccccacaccacacacagaatgaaaaagcaaataccttatggcataacagcaatacttctgggcttctccaccatctctgacgcagcaccaagcatgaagtcaagtcatccggaacaagcaatagaaagtacgtcattaaacagggccaactcagtacccctaacgtcaacgctggaggatcacttcatagacgaatacaaaaggctaaacgcatcttgcaactaacaaagctaacgcgcgcggagagctaatgaattcaacgcagacgctctccgcttgctatcaaaacgaaggaacgtatatggacaattgcacccaaattaaaaatcttatttttcacgacgcggagggcaacagaattggattaattgccccttcaactttctactgcatatatggtggttgcacatatataaatggcccaaagaaagtaattaagttacacgaacaaaccattgaagctttaaccgaaggattacgacaatcaggatcgttgatagagggtgatcataaagacattgaaaaattattatcattgctcgcaaaccctattagcagccggaccgctagctttttcatgtgtgcaaatcaaaatggcaaaaaaataattgacgactttaagtccatagaaaattcaaacctcttaatcgtaggatgcggaggcataggcagcacggcggctttgctgttagctggctgcggagtcaaaaacataacattagtggactccgatattatagaaaaaagcaatttaaaccggcagttattctggaaacttgaagatataaaaaaacccaaagtagaagtattaaaaaaagccattgaggaacgatttgaagacacaagcatcacgaccctacagactcacttagacctcaacggactaagacaacttgttggaaaaaagaaatttagcgtcgttttagttactgctgatgacccaccaacaatgtcggctcagtgcgcagacctagtaaaacactctgaaacaccattcgtgagtggtggatatctacacggacaatgtgctgttaattttttccctgtatctcttcacgaagaactccgtgaaatccacccaaatgcaagtaaatggaaaaagcttaatccgtcaataatgcccagcttcgggcccaccaatatgaacattgcatcgttattagcgtccggggcaatttcttttatagcaaaccactcactcccactaaaacatcatacatcaattcaatggaatgcaagcattgcacccagctcattcagaacattcactgatgaaaaacaacactaaccaagagaaaacatcatgaatattataaaatcaatacatatggcgctaggtttactgatagctaccagtgtaaatttatcaaatgcaaacgacctcgtaactgatacttcaacctcacatgtactaacaattgtattcacccctcctaaaggtatggagcgcgagttttttgaaaactttgtgcaaaaccaatcgaaatacatgcgtatttactcgggaaagcaaaaacaaaatactcaagtgataaatattgcaccaacaaccctaggagaaccgcttatacatctaataatctataataacaaagcttcatttgataatgcgaaagacatatttcgcagcaccgaagtttttgcgaactacatgcaaaagcactcttcccgattcggaaactacgaaatatcaaaaccgtacctagagaactcaaacgtttattttggagaggtgataaaaaactaaaatatgcgaacagtaggtccaacatgaaacttaccaaaaccgctttctatagcctaatgctatgtagcttagccaactcatcagttgccgacagcattgtaaataacctaacgattataaatagctgcataaactgtcatggtataacaggaagcaactcaaacgaaataccacagttccataaaaaaaacgaggagcaattaacacaaatactgatggcctataaaagcaaaaatacaaaagggaccatgatgaatagagtcatggagcaatatagccaacaggacataaaggctatagctattatttttagccaggcgaaccgctgagtatgattcagcgtttactcttgcgcttccacaaactcggagttactccactatgactaaatcacgcagagacgctataaaattaattctggctagtcttggctacgcccttaatacttcgggcgccgcaacagaaaaagctcagattacagcctcaaaaaaaatagtcatcattgggggtgggtttgccggagccacacttgcgaacactctacacgcgctagataacacactccatataactttaatcgaaccaaataaatactatcattcatgcccactcagcgccgagtacttagtaggtaagcgcactaaagaatcgctaacatttagctacagaaacctgtctaacgtaaaatcaattcatgttattcacgatactgccacgcatattgactatgaaaagaaaacaatactaacgaaacgttctggcagtcacagctatgaccgatgcgttgtaggtattggcgtaggctacaagtttgactcaattgaaggttatagccctgaagtttccgaacaactcccacacgcatggtcaggtggagagcaacaagcgatcttaaaaaaacaacttatgtcgctacgagacggcggaacggtattgatttccgcaccttcaggcgactacaaatgcccgccaggaccatacgaaagagcaagtctaatagcggaatttctaaaaagaaacaggcgccgatcaaaaataattatattggatggaaaaagtgattttcctaagcaagagctttttgaaaaagcatggagggagttgtatggctatggaacatctaacagtattattgagtggatcagttcggaaaagggtggcattgtctcagccgtcaatccaagaaacagagatattctaacttccgctggaactattagagcggacatattgaatatcatcccccctcaaaaagccggcacatttgcacatttcaacgacctaaccggacctcatggctggtgtccaatcgatacgaagacttttgagtcatcgattaaaccttacgtccacgtaattggtgacgccgcctacgctgaaatgcttcctaaatctgcattcacagcatgcgttgaagcgcgagtctgcgcagtagctatttactgcctattcaacaatcatcctattccatgccctcaattcatgaatgtttgttatagcttatgcgcggagaactacggaatatctgtattcttacgttatgaaagaaacataaaaacaaacatacttgatataaaaaacctagtaaagacccccctgaactctacaaaagaagactatcgaaaagaatcccaatttggctatagcatgttcaatactatgacagcagaagcatttgggtaacttcactcaggaattcaatatatgctattagacctttcatccataagcaaagttagctaccccgactttattgctttaatgaagcaagataacactccacctggcggaatagaaactttaaattattggataacaaaaggaaaaatccatcggaaatctacaattctagatttagcttgctctacagggtttagctcaagatattgctttcagcagacaggagcaaaatctattggcattgacatctctcttgactctatcaacgtggccaataataaagttagggaaatgggggcagcagcatgcgtgacgtttctaaatatggacgcttgcaaattatctttcaaagatgaaaagtttactcacgtattagcagggtgtaacttcgcattcatccaagaccgttcaatagctcttgacgagtctcttagaacactgtctaaaaatggggcaatttgcgtttcaaacttttattataggaccccaccgccaaatgaaatactggaggaagtccgtcattccattggatttaaaccaagtcataactggacctacgaatattggctaaactttttccagtctaaaggcttaaagctttcttatgaacataattataatctagcctccatccctgaaaccgtactccacagatccatagaacaatatatacacaaggaaaacacttttacatccactttaattccagagttcaagaatgaattttttcaaaaattttatagcataaaaaaggcccttaactctcagcgaaattaccaaggagtgtcagtacagatatggcacaagccctagcccctacacgcgtgagaaacgctatatctcggatagctcaagatcactctttagatgatgcctttgtagtcattgatatggttgaggttctggaaagagctatttctttcaagtcatgtgcagaaaagcactttaaaaatattgaaattgcatactcatataaaactaacaacctatcctctctttgtaatgcattaagccaaaaaggcttttccgccgaggttgtgtcgttggatgagatgcattgcgcgatagctgacggatatcttttggataagatactttttgatggaccttacaaaaaatattcggagttggagtttgcaatatcgcacaatgtaaggatacaagttgacaacatatttgaactagaaaacatatattacatatgcaaaaagtcaaataaaacagcacaaatctcgctgaggctttcgcaccactaccgccttgcccagtctagatttggattaaacaagcaggagttacacatagccctaagtaacaaaaaatacactgacaataatcatataaacctcaaaggctttcatcttcactctggctctaaccttaaagatacagctagtattgaaaatactcttaccgaatatgcagacattattcttcgatatatgcctgaagatggatggcttgacctaggcagtgggtttcctgcagattcattttcttcagacccacaccaacctacacctactgtagattcatttatgagaaatcttaaaactgagcttagtaggctattcaaaagcgcgtatgaaaattggaaaattatatttgaacctggacggtgcctggtagaggactgtggatatttcgcaacgaaaatagtcagttcaaaaaaaagacttgatacaaccatcctgcaaagcaacatcggtataaattgggttccatcagtacacaactgggctcactccattgaaccaatcacacccaatacgactttaccaccaaacaagcaagtcattagcggcatcaattgtttcgaatcagactacatttgtttcgacttcaacaaagcgaaaatcgatataggtgactaccttcttgttcgcggctgcggcgcttatgacttacaaacatcaaatatttggacccgatgcggtgtcagagtttactcgatattctcccacggctgcgtactgtccagaacccaccaaaaaagcgaaagtctgcgaactcgcgacgtaccgactttaaacacaaaaattgtgatttctcagtctttacatttgcttgaggcaaatcaaatatattacaaagagctacataatttaatcatagaaaacaaattttatctaagcgagtttcttgactggcctaagttcataaataccgagacggacaccctagagtttttagccaacgcagcaatacagcataaaaggtcatcctcaaaaacgtttatcatttcctataacaaccaatgcacaggtgtaatctctttcaacaccatagataggcataatcaaacagcagagattggatactggatctcacagaacaatgaaaaaaaaggaatagtttcctctgcactaaaacacctaatagaaatgtattcaaaagacaattacataatgcgattcgtaattaaatgctcaaccgccaacatcaaaagtaaccgcgtcgcgaagaggaacggatttaaacttgaggggaagttatttaaagcagaaaaagtcaacgaaatcttttatgaccagcacatttactcgaaaacgatgcatccctgacatcgttaacccaaatattctctatgagcttataaagctactgctaagaagcacgcagccttaacttatccattagtcacgttcggtaggccagggcagaatcggaatcgccgtcacggcgttctgcgggctgccctcgatcaggcggtcgctgtagaccaggtaaaccagggtgttgcgcttcttgtccaggaagcgcaccacctgcatggtcttgaacaccagggaggtgcgctccttgaacacttcgtcgccgtccttgagttcgcccttgaagcggatcgggcctacctggcggcaggcgatcgaggcttcggcgcggtcttcggccaggcccaggccgcctttcacaccgccggtcttggcgcgtgacaggtagcaggtcacgccgtcgaccttggggtcgtcaaaggcttcaacaacgattcggtcgttgggcccgacaaacttgaacacagtcgacacctggccaatttcttcagcagaggccagcagtggcatggccaacagcaggccgagcaatcccttcatcacgcgcatcgtgtgcttcctatggttagaccaggatcaggttatcgcggtgcaccagttccggttcagccatgtaacccaatactccgacaatcgcatcggaggattgtccaataattttctgggcttccagcgcgctgtagttggccaggccacgggcaatctcgcgaccgtccggcgccacgcacaccaccatctcgccccggcggaagctgccctgcaccaacttgacgcccaccggcagcaggctcttgttgccttgagacaacgccgacacggcaccctcgtccagcaccagcgtgccacgggtttgcagatgaccggccagccactgtttgcgcgccgcgagcatgccgcgttccggtgacagcagcgtaccgatgcgttcaccggccttgaggcggtccagcacacgttcgatgcgcccaccgacgatgatggtgtgggcgccggaacgcgccgccaggcgcgcagcgcgcagcttggtctgcatgccgccacggcccagggcaccaccaacgctgccggccacggcgtccagcgccgggtcatcggcacgggcttcgtaaatcagttgagcgtcgggattgttgcgcgggtcggcgtcgaacatgccatcgcggtcggtgaggatcaccagcaggtcggcttccaccaggttggccaccagggcggccagggtgtcgttgtcgccgaagcggatttcgtcagtgaccacggtgtcgttttcgttgatcaccgggatgaccttgagctccaccagcgcgcgcaaggtgctgcgggcattgaggtagcgcttgcggtcggacaggtcgtcgtgggtcagcaggatctgcgccgtgtggcgaccgtgctcggcaaagctggattcccaggcttgcaccaggcccatctggccaatggcggcggcagcttgcagttcgtgcatcgcgctgggtcgcgcggtccagccgaggcggctcatcccggcagcaaccgccccggacgacaccagcaccaactccacgccagcctcatgcaaggccaccatctgctcgacccagacgcccatggctgcgcgatccagccccttgccatccgccgtcagcaacgcactgccgatctttacgacccagcgctgcgcacctgtcactttgctccgcatcatcttcaaccttagattgagggcagcgcgacccagcgcggcccataacgttaaacccggatactaaaacgccgctctataaggagcggcgttcaagtttatcgcaacgaatcagtcgcgcacgtaaatgatttcaggaccgtcttcatcatccacgtcttcttcgtcccaatcgtcgtcgccgatgtcatggaccgacttcacgccgctgcggcgcagggcgcgctggtcatccagagcctgcagttgagcgcgggcttcgtcttcgatgcgctggtcgagttcggccagttcggccttgaacaccgggtcggccgccaggcggtcggcacggtcttcaaggtagcgcatgatatcgcgggtcaggcgctcggtgccttctttggcaatggcagagatcacgtagaccgggccttcccactccaggcggtcgacgatttccttgacgcgcgcttcgtgttcttcttcgaggatctggtcgcacttgttcagcaccagccaacgatcacgctcagccagggacgggctgaacttggtcagttcgctgacgatcacttcggcggcatccggtgcactggtgtcatccagcggcgccatgtccacgaggtgcaacagcaaacgggtacgcgacaagtgcttgaggaagcgaatccccaggcctgcaccatcggaagcaccttcgatcaggccgggaatgtcggcgatcacaaagcttttccaacgatcgacgctgaccacacccaggttcggcaccagggtggtgaacgggtagtcagcgactttcggcttggcggccgacaccgagcggatgaaggtacttttaccggcgtttggcaggcccagcaggcccacgtcggcgagtactttcatttccagcttgaggtcacgctgctcacccggcttgcctggcgtggtctggcgtggcgcacggttggtactggacttgaatcgggtgttacccagaccgtgccagccgccctgcaccaccatcagcttctggccggccttggtcaggtcgccgattacttcctgggtcgcggagtcgatgatcgtggtgccgaccggtacgcgcagtaccaggtcttcaccttttttaccggtgcagtcggtgctgccgccgttggagccacgctcggcatcgaagtgccgggtgtaacggtagtcgaccagggtgttgaggttttcgtcggccatcatgtagatggaaccgccgtcaccgccgtcaccgccgttggggccaccgttttcgatgaatttttcgcgacggaaactcatgcaaccgttaccgccgtcgcctgcttttactcggatggaaacttcatcaacgaacttcataacaaaacgcctctcgccgcttggacgagcttaagaaaccaagacataagactcttgcaaaaatgagcgcagcgacctcaatcagcgaccgcaaaaccagcgcctgagcccattacaaacagctttgcaagagactcaccccacaaacgaaaaagccccgtcgcaagacagggcttttccagcgatctcgcaattaagctgcgacaacgctcacgtaacggcggttgaacgcgccttttacttcaaacttgatcacgccttcgattttcgcgaagagggtgtgatctttacccatgcctacaccgtaaccggcgtggaattgggtgccgcgctgacgcacgatgatgttgcccggaatgattttctggccgccatacatcttaacgccaaggcgtttggcttctgagtcgcgaccgttacgggtactaccaccagcttttttgtgtgccatgagtcaattctcctagtgaggaattaggctgaaattaagcctgaataccggtgattttgatctcggtgtaccactggcggtggcccatacgcttcatgtggtgcttacgacgacggaacttgatgatgcggactttatcgtgacgaccttgggagatcacttcagccacaacggtagcgccagcaacaactggagcgccgatgttcacgtcatcgccattggcgaccaacagaacgcgatcaaaagtaacggattcgccggtagcgacttccagtttttcgatcttcaggtattcacctggggcgactttgtattgcttgccaccagtaacaattactgcgtacgacatggtatttctccgataatcctgctcacccagcgctttataagaagaggtattggctggcatggctgcatgggatggacgtcccgaatgcaattgcgtaaggcaggtgctgcccaggaagttcagggtgcgcgattgtacgcaaggcaacggggtgttgcaagaggccgtctatcgcgccttgacactacggggcctgggtcctagcatgccgcgcaacccttctggagcgactgtcgctgatgcaaccccaagctttctaccgcgcggtcgcggacgattttagcgccgtcgacggcatcatcaagaagcagctgacttctaaagtgccgctggtctccaaaattggcgactatattacgtcggcgggcggtaagcgcctgcgtcctttattagtgttgctgtgcggcaaggccctgggccgtgaaggcgatgacctgcgcctgctggcagccaccatcgaattcctgcacaccgccaccctgctgcatgacgacgtggtcgacatgtccggtatgcgccgtggccgcgagaccgccaatgccatgtggggcaacgcccccagcgtactggtaggcgatttcctttactcgcgctcgttcgaaatgatggttgaactcggctcgatgcctgtgatgaagattctttcacaggccacgcgcatcatcgccgaaggcgaagtgttgcaactgtcgaaggtccgcgacgccagcaccaccgaagaaacctacatggaagtgatccgcggcaagaccgcgatgctcttcgaagcctccacccacagcgccgcagccttgtgcaacgccaccgccgaacaggccgaagcgctgcgcacctttggcgatcacctgggcgtggcgttccaactggtggacgacctgctcgactaccgtggcgatgccgaaaccctgggcaagaacgtcggtgacgacctggccgaaggcaagccgaccttgccgctgatctacaccatgcgcgaaggtacgccggaacaggccgccctggtgcgcaaggcgatccagaaaggtggtatcgaagacctcgaagccatccgcgccgctgtcgaagcgtcgggttccctggactacaccgcgcaactggcgcgtgatttcgtggcgcgtgccatccagtgcctggaagccctgccagccagcgaataccgggacgccctggtcgagctgagtgagtttgcggtcgcccgcacgcactgacgcggacgaatgtgggaggggctcctcccacatttagatttcatacaacctgtaagaccacaaatccctatataatgtgcgacttttagccatcctgactttcaaggagctttagtgagcacgttgccaccctgcccgaaatgcaattccgaatacacctacgaagacggcgcccagctgatctgcccggaatgcgcccatgagtggtccgccactggcgaggccgaagcggccggcgatgaagccgtgaagaaagactctgtgggcaacgtcctgcaggacggcgacaccatcaccgtgatcaaggacctcaaggtcaaaggcacctccctggtagtcaaggtcggcaccaaggtcaagaacatccgcctgtgcgacggtgaccacgatatcgattgcaagatcgacggtatcggcccgatgaagctcaagtccgagttcgtgcgtaaagtctgaacccgctgcacccatcccgcgcccgccgcgggatggcgtttcgccctctgcgttgacctctcgcaatatccacacagaaaaacccggaaatcgccaataggcacttgctattctacgaataagaattattctcattgaaacccatcaaggagatgcgacccatgacttatttgatagatgcctggctggaccgcccacacccttacctgcggatcctgcatcgggaaaccggtgaagtctgtgcggtactggaagaagaagcgctgagtgaactgcaggatcagggcgacctggacgtgaatggcctgagttcgagtgaacctggagtgctgaaggaggtggtgcgtaatctgtttctgttctgctatgcccgagcgttgcgcccggcgacggagctgaatggcaagttccatccatgaacacacccgcaaaacactgtggggacgagcaggctcgctcccacaggtaatcagcaggtcttacagaacgtcgagcagctcgacgtcgaacaccagaacgctgtgcggcgggatgctgccaacgccttgagcgccgtaagccagttcgctcggcacgtacagacgccatttgctgccggcattcatcagttgcagggcttcggtccagccggcgatcacgccgccaaccgggaattctgcaggctgaccgcgctcgtaggagctgtcgaacacagtgccgtcgatcagggtgccgtggtagtgagtacgcacttggtcttcacgggttggcttggcgccatcaccggcggtcagcacttcgaactgcaggccggaggccagggtggtgatgccatcacgcttggcgttttcagccaggaatgccaggccagcgcccgccgcagcttcagcctttgcagccgcttcggcctgcatgatttcacggatcactttgaagctggcagccatttgctcctggtcaacacggcttggcttgccggcgaaagcgtcggtcaggccggccaggattgcgtccaggcttacaccaggtggcggattgtcgcgcagttggtcgcccaactgacggccgataccgtagctgacgcgggtttcgtcggtggacagattaacttcggacatgaagaggctccgctgtagggcgacacagtttcccgtgtcatccaaaactaaaagggcccgcagactagcacaaaaccggcgcgcacgatgagcttggcgcctcgtgccggcgggccgccgttagtcggttactcgcgggggcgctcatctattcacgaataaaaagtttcagattcccactcacccgccgatacagcgctacacatcttggctggctcaaacaacaacaccgcccagcagacagacatcacctttgcggagcattcgatgaacagctggttcggtaacatcagcgtcaacctcaaactcggcctgggcttcggcctggtgctggtcctcacctcgatcctcgccctcactggctggaccagcctgggcagcctgatcgaccgtagcaactggatgagcgacatcacccagctcaacgcgtcgctgaccaagctgcgcatcgtgcgcctgcaatacatgctcgccaacggcgacgaggccgtggcccagaacgtacagaccaacctggatgccttcgctgcccagcaacagaaactgctggacagcttcaagagcccggagaacgtcaagctgctcaacgagcagaaagcgatcatcaccgcttaccagcagtcgctaaataaaatgcgtgaggcctaccgtaacggcaacgcctctcgccaagtaatgggcgacaaagccgacatcgccaatgcgcagatcaatgcgctggagaacagcgtcaagcaaatgcctgacagcacggagcacctggcccagttccaggccgtggccgacgccaagatgcaattccaattggcgcgctacgaagttcgcgggtacaccggtaacgtcaacccggacaccgaagcccgtgccgccgcacagattgaaaaagccatcgccggcttgaaagacctcagcgccgctttcggtagcagccaacagaacgcactgacctcgctggaaaccgctctgggcgcctaccgcactgccgtgcagaactacaaggcggccaatgccaacatcgtcaccgcccgggccgaaatgaccacccaaggcgccgatatcgtgaccatcagcgacaagctgtacgacattcagctgaaccgccgcgacgccgaaagcgcccaggcccgcagcctgcaattgatcagcaccttgctggccctgctggtcggcgtgattgccgcgctggttatcacgcgccagatcacgcgcccgatccaggaaaccctggcagtggtggaacgtatcgcttccggcgacctgagccacaatatccagattacccgtcgcgatgagctgggcgtgctgcaacaaggcatccagcgcatgggcaccaccctgcgcgaattgatcagcggcatccgcgacggcgtgacccagatcgccagcgccgccgaagaactgtcggccgtcaccgagcagaccagtgccggcgtgaacagccagaaaatcgagaccgaccaggtcgccacggcgatgcacgaaatgaccgccaccgtgcaggaagtcgcgcgtaatgccgagcaagcctccctggccgctgctgacgccgatggccaagcccgtgccggcgacaaagtggtcgctgaggccatcgcccagatcgaacgcctggccgctgaggtggcgcgctccaccgacgccatgacccatctgcaacaagagagcaacaagatcggcagcgtgatggacgtgatcaaggccgtggccgaacagaccaacctgctggccctcaacgcggcgatcgaagcggcgcgtgccggtgaagccgggcgtgggtttgccgtggtggccgacgaagtacgtggcctggcccagcgcacgcaaaaatccaccgaggaaatcgaaggcctggtcgccggtttgcagaacggcacccagcaagtggccaacgtgatgaacaacagccgcagcctcaccgacagcagtgtcgagctgacgcgcaaagctggtgtgtcgctggagaacatcacccgtaccgtgtcgaatatccagtcgatgaaccagcagatcgccgccgccgccgagcagcaaagcgcagtggctgaagagatcagccgcagcatcgtgaatgtgcgtgatgtgtcggagcagaccgctacggcgagtgatgagacggccaagtcgagtgtggaactggcgcggttgggcagtcagttgcagcagatggtcagtcatttccgggtataaaagccgcagtccctgtggcgagggagcttgctcccgttagggcgcgaagcggccctgatcaagttgatgcagatttgaagttgagagcgcagtgaatgcttggggctgctacgcagcccaacgggagcaagctccctcgccacaggcaaacttagacatactcggccctccgtgagttgggccttacctccagcacacttaccggaacacgtgggccttcggacgcgagtcgattgcgtcctttgagagtgcaaccccagccactaactggtgttgcaaaaaaaaccgccctaccaaggcggttttttattgcctgcgatttgcccctcagccctcaccttcctcaacaaacaccagccgattcccaaacgggtccttgatgctcatctcccgcgcgccccaaggcgtttcctcaacccctggcttggcataccgataatccttgcccaccaattgctgctgatacgcgtccaccccctgggcctgaatccgcaccgccgcgcccggcgacgcatcgccatggtgctcagtcaaatgcaacacgcattcacccagcgacacttgcaggtacaacggaaaactcgcttcaaaacgatgctgccaatccaccttgaaccccaaaaagtcgacgtagaattccaacgccttggcctcatcgaaaatccgcaggatgggggtgacttttcctaagtgcatggcaatcgctccgttcataagagcgcccactataaagacgaaaatccccgacgcaaatccccactgcgcgccaggaaacgcccctgccgctgaccgttcgcctgcccgtcgcagtagctcaacactccgttgacccacaccccatcaatgccttccgccgcccgctgtggttgcttgaagtccgccacatcgcgcacgcgcaaagggtcgaacagcaccaggtcggcccagtgcccttcgcggatttcaccgcgctcggccaggccaaatcgcgccgccgacaagccggtcatcttgtgcacggcagtgtgcaacgggaacaacccgacatcccggctgaaatgccccagcacccgtggaaacgcaccccacaaacgcggatgcgggaacgggtcctctggcaacccatccgaccccaccatcgacaacggatgcgcgagaatccgccgtacgtccgcctcatccatcccgtaatacactgcccccgccggttgcaggcgacgcgctgcgtccatcagcgaaacatcccactcagcggcaatgtcctgcagatcacgcccccccatgtccgggtgcggcgtcgaccaggtgatggtgatgcgaaacgcatcggtcacctgcttgaggtccagggtcgaagaactcgcagcatagggataacaatcacagcccaccgggtgggttttcgccgcccgctccagcgatgccaacaactgcggactacgcccccaattcccggcgccggcacatttgaggtgggaaatgatcaccggtgcctgggcatgtcggccaatcaaaaacgcctcgtccatcgcctccagcaccggctcgaattcgctgcgcaaatgggtggtgtacaccgcgccgaaggccgtcagttcttcactcagttgcagcacctcatcggtctcggcgttgaacgcgctggcgtaggccaggcctgtggataaccctagggcaccggcttcgaggctttcttgcaactgcacgcgcatggcggcgatttcgtccgctgaagcgctgcgatgcaggtcttgcatgtgattgctgcgcagtgccgtgtgaccgatcaatgcggcaacgttgaccgccgggtgagcctgttcgaccgctgctcgatagtcagtaaaacgcggatacacaaacgccgcagcgctgcccaacaggttcatcgggtccggcggatcactgcgcaacgtcaccggcgacgcactgatgccacagttgccgacaatcaccgtggtcacaccctggctgagcttgggcagcatctgcggatggcggatcaccaccgtgtcatcatgggtgtgcacgtcgataaaacccggcgccagcacacgcccctgagcgtcaacctcatgcgcgcccgatgcgctcgacaaatcaccaatcgcctcgatacgtccggcgcgcagccccacatcggccacatagcctggggtgttgctgccatcgatgatcaatgcctgacgaatcagcgtgtcgtacttcatatcagtctccaagcggcaggctgtcaggcccgccgcgataatcgtccagggccagcttgatccggcgcaggcgttcctgattgccatccggcgaggccagagccaactcggtggcgagcaggtcgatagccagcagcatgccgtagcgggcggcggtgggcttgtagataaaactggtttcggccggctgcagcggcagcagcacatcggccaattgggccaagggcgagtcggccagggtgatggcgacgatgcgcgcgtcgtagttgcgcgccaacgccaccacgtccagcagttcgggggtgaggccagtcaaggaacacacaatcaacgcatgctcaggccccagcgtcgccgccgtaacccgcatcatcaccgggtcatggcaggccgcaatcggatagcccaggcgcaccaggcgcacctgcaactcatcgctgcacaggctcgacgggccgcccatgccgaacgcatggatcatccgcgccttgcccaacaggctgaccgcatcgacaaaactggcctggttgaatccggagagatgctgacgcaacgtcgcctcgatatcccccaggatctgccgatgaaacgccgactgttccggcaaccccgccgggtcgaggaagcgactgccgacgccgctggcctgggccagttgcaggcgcagatcacgcaagtcccgacaccccacgctgcgcgcaaaccgtgacaacgtggccgtactgacctcggcccgttgcgacaacgcttccaggctggccgacgcggcaaaccccacgtcatccagcatcagcttggcgatacgcccttcgccggcgctgaaggcgtcctggcgagcgcggatctggtagaggatgtccatgggctctccgggttacaaaatacaggacagaccataagtcagaccgaaggcgaccaccgaaatcaacgtctccaacacggtccaggtcttgaaggtctggatcaccgtcatattgaagtattccttgatcagccagaagccgccgtcgttcacgtgggaaaaaatcaccgaacctgcgccggtggccagcaccagcaactcagggtgtggataacccaggcctagcgcgacgggcgctaccacaccggacgcggtggtcatggccaccgtggccgaacctgtggcgatacgcatcagcgcggcaaacaaccagcccatcaccaacggcgacaggtggaaggcatgggccaggccgagaatttcgttagtgacaccggcgtccaccaagatgcgattcaacccgccgcccgcgcccaccagcaaggtgatgctcgcggtcggcgccaggcattcattggtgaacttgaggatcgactcacggttgaagccctgtgcaatccccaaggtccagaagctcaccagggtcgccaccagcagcgcaatcaccgagttgccgataaacagcaggaactggttgaaaccggtgcccggcgtagagattacattggcccagccaccgatcatcatcagcaccaccggcaacaggatggtgcccatggtcagggaaaagctcggtaaacgggtacgcggttcgcgctcgatgaattggcgttccagcgggttttccgccggcagatgaatacgcggcacgatgaacttggcgtagaccgggccggcaatgattgccgtcgggatgccgatcaggatggcgtaaagcacggtctgccccaccgacgcgttatacgccagcaccgccatcatcgccgccgggtgcggcggcaccagcgcatgcaccaccgacagaccggcgaccatcggcagcccgaccatcaggatcgacacgccgaccctgcgcgccacggtaaaggcgatcggcaccagcaacacaaaaccgacctcgaaaaacagcggcagccccaccagaaacgcgatgcacaccattgcccaatgcgcgttacgctcgccaaaccggttgatcagcgtgcgcgccacctgctcggcaccgccggactcggccatcatcttgccgagcatggtgcccaacgccaccaccagggcgatatgccccaaggttttgccgacacccgcctcgtaggaacccatgatggtgtccgccggcatcccggccatcagcgccaggccgatggacaccagggtgatgacgataaacgggttgagtcggtaacgtgcaatcagcacgatcaaagcaatgatggcgatggcagcgtatgccaacagcccgaagcccggtgatgcggccatgcggtactcctcggaaagggtcacgtcgaattggttgtgaaactcataaatcattaccgaggattattttcaatttttatgaaagtaactttcgcccacaggtaagcgctgtcgcgttgggatatgcccgacaggcgtgaatgaaaattcgaggggtgttcttacatgaagatcggaggatgccggaaactcaagcgcagccgttgagtcttagaatgcgcaacccttcatcatcaggaaatcgaccatgattcgcacagccttcgccgccagcgccctgctcctcgccctgtgcggcaccgcttcggccgccgacaacccagcgctgaagaagtgcatggacagcgccaacaccaccgccgacatggttacgtgcaacgccaacgaagccaaggtgcaggacgcacgcctgaaccgcgcctacaagaccgccctcgccgcccaggaaggcccgcgcaagcagcaactgcaagacgtgcagcgcctgtggataaaataccgtgacgccaattgcgccttcgccggttccgccaccggcggcagcatcgaccgggtcaacggttccggctgcgtgctggacatgacccagacccgcgcccaggaactcgaagacctggtcgggccgtagtcagtcagtcgtggtgaaccctggcgcgcttgagcagcttcttgcaacgctccgacagatgcagcacccgcaggtgcttgccggccttgctgtagcgctcgcgcaaggtcatcaacgcggcaatcgccgagtagtcgacaaagctcaggtgacggcaatccagcgtcacctgggccgggtcgttggccgggtcgaactggttcaaaaacggcgtggtcgaggcgaagaacaacgtgccatgcaggcgatagagcttgctgccatcggcctccagatgctcatcggcatatagctcgcgcgcttgctgccaggcgaaattcaacgccgcaatcacgatcccgcacagcaccgccgtggccaggtcggtgaacaccgtgatcaccgtcaccgccagaatcaccagcacatcattgagcggcaccttgttgatcacccgcaaggaggcccaggcgaaagtctgctgggacaccacgaacatcacgcccaccagcgccgccagcggaatgcgctcgatgaacggcgacaggaacaggatgaacaacagaatcatcaccccggcaaacaccccggacaaacgcccgcgcccgccggagctgaggttgatcacggtctgtccgatcatcgcgcagccacccatgccgccgaacaggcccgagaccatgttcgccgcgccaagggccacgctttcacggtcggggtagccgcgggtctcggtgatttcgtcagtgaggttgagggtgagcagggtttccagcaggccgaccatcgccatcaggaacgcgtagggcgcgatgatgccgagggtttccagggtccacggaatctgcggcagcgccaaattcggcaggccgccggcgatgtgggccatgtcaccgagggtgcgggtcggcaggccgagcaggtacaccgccagccccacgccgaggatcgccaccaacgcaggcggcacggcgcgggtgatgcgcggcagcaggtagacgatggccatggtcaccagcaccaggccggtcatcacgtacaagggcgtgccgctgagccaggtttcaccacttttgaaatgctccaactgtgccagggcaatgatgatcgccaggccgttgacgaagcccagcatcaccgggtgcggcaccatgcgcaccagcttgcccaggcgcagcaggccgaaggcgaccatgatcaagccgcccagcaacaccgtcgccagcagatactccacaccgtgttgcaccaccagcgcgacgatcaccaccgccatcgagccggccgcaccggacaccatgccgggccggccgccgaacaacgcggtgagggtgcagatgatgaaagcgccgtagagccccatcaacgggttgaggtgagccaccagggcaaaggcgatgcattcgggcagcaacgcaaaagacgtggtgaggccggccaggacatcggcgcgcagacgggtgaggttcatgaagtaccagggtaatgcggggataaggcggggaatggtacggaattgagggagatggagctagtctcgaagaccgagtcgtgccaatcgggggcaagccccctcccacactagactgcactccatagttggaactcggtcaactgtgggagggggcttgcccccgatagcaacaccctggggatcaagtgaacatcacaccatttcgtggcgaatccactccaccaccgacgtacgcttcggcgcccagcccaacagttcacgggcctgcttgccgcgcacccggctgttggagcccaagccatagttggccatttcatagccccactcggcttcagcgtcggccaatggccaatcctgcggtttgcccaggttcagcgcttcggcgatggcggtggtcatgtcgataaacgcggcctcgctgctttccacgaagtagaaagtaccgggcacattcttggtcagagccaacaggtacaacgccaccacgtcttcgatgtgcacgttggaccagatgttctgcccggtgcccacgtggcgcactacgccgcttttacgtgcttgtttgagcagacgcggcaattgcacgctgtcgcgcttaacacccaggctgtggccgtagatcagggtgttgcagatcactgccgaattcacgccatcattggccgccgcgaggatcagattgtcgatggccacacgagccgccttgtcgaccgtcggctccggcaggttgccctcgaagtagatgacatcgctggccttgccgcccgacgcatccccgacaatgctcgaaccgctggtgtgcaggaacaccttgttcgagcccttcaacgccgcgagcagagtttccacggcagcacggtggtcgctgctggcggcgttgatcaccgcgtcggcctgttgcgcttgctcggtcaatacagccgcgtcatccagggtgccgatcaccgggttgatgcccagtgcggtcatctcggcagcctgctcggcgctgcgcaccaggccggtaacggtgtggccggccttaaccaggccggtcgcgatggaaccgccgataaaacctgctgcgccggtaatgaatacgttcatggaagactctcctggctgggtaagtgatggacccagtatcaaggcgtcatccctgacgaataagcccctggcgcccaattcactcttgcgctcaggtcacgaatcagcaggcataccgcgccagcttggcctggataaagtccaggaaacactggatacgcaacgccagctgcgagttgcggtagaacactgcgtggatcggctggcgatacccgctgttgaacgcctccagcaccggcaccaggcgcccggtctcgatatcgtcaatggtcatgaagttcgacaggcagcagatgccctgcccctccagcgccaactggcgcacggtttcgccgctggacgcggccacgccgggctggatcagccagcgatcgccctcaacatggcgcagcggccagtggttgagggtttcggtctgggtgaaccccaacagcgtgtgatcggccagctcggccaccgtggtgggcgtgccgtattgcttgaggtagccggggctggcgaggatatgcagcggcgtacagccaagagatcgcgcgtgcagggtcgagtcagccagggcgccgatgcgaatggcgatatcggtgctctgttccagcaggtcgatgatcacgtcatcgctgttcaactccaactggatatccgggtagaggctacgaaactcggcgatgtacggcacgatcccatgcagcatgaacggcacggcagcgttgacgcgcaggcgccccgccggtttctgctggcgtgatgacaggcgctcttccagctcttccatctgcgccaggatcaccttggcctgctcgaagaagtacttgccctcttcggtcaggtccatgcgccgcgtggtgcggttgatcagcgtggtgtcgagcttggcttccaggcgcgacaacgtgcggctgacagccgagggcgtctgcccgacttgctcggcggcggcggaaatcgaaccacattcaatcacgctgacgaagatctgcagctcatcggaccgggctttcacaggcgctcctcgttatcggttcagcgcagcttacaccgagaatttgaacacctgcgccagatgctgctcgtagcgcgccacgtcagcttcgatggccgggcgtttcatcacgtccacgcacaggaacgtgggcaggccggtcatgccgaggaactcgttggccttgtggaacgggaaatacaccgcgtccacgcccttggcttcgaagaagtcggtcgggtcgtcgaaggcttgctgcggcgcgttccaggtcagcgacaacatgtactgcttgccgtggatcaggccaccactgccgtacttctgcgaggcatcagaacgggtgcgaccgtcgctggcgtacaggctgccgtggccttcggtgaagacttcgtcgatgtacttcttgacgatccacggtgcgcccatccaccagccgggcatctggtagatggtcacatcggcccagaggaatttgccgacttcttcggccacgtcgtagccttcgtcgatgtgggtgaccttgacgtcgatgccagcacgatccaacgccgccacagcggtgtcatgcagggtagtgttgtagcggccatcggagtgagcgaactttttgccgccgttgagcaagaggacttttttcatggggtatccagaggggttaacaatgtctgccggcaggctatcgacattgccccctcggaataagcagcggtgaggcaaaatacatttgaccaaaaagcacgaatcacctgcgcattgttaaccactgatcagcagatgggcgcccagcaatgccatgccgatgaaaaatacgcgcttgaacaacaccgcactgatgcgctgacgcactacctgacccaaccacatgcccaatagcgccggcaccagcgccagcaacgacgcgttgatttcaccgccaccgagcgtgccgcgccaggccagccctgcggccaatgccagggtggacacagtgaacgacagccccagcgcctgcaccaactgatcacggttcaggcccagggcttgcagatagggcacggcgggaatcacgaacacaccggtcgccgaggtgatgatgccggtgatcaccccgcacacggggcccagccaacgttcagtcgcaggatttacgttgaacgtcggcaggaacaaaccgctcagcgcatacaccagcaacgccccgcccaacgcatggcccacccagcttcccccgctcatgcccagccacaacgtgcccagcccagtgcccaggaagatcagcagcagcatcggccacaagcgcctgagcaacgcactcaaatgaccaccggacgccagttgccacaggttggtgatcgtcgaagggatgatcagcaacgccgcagcctgcgtcggcagcatagccaggccgagcaagcccatggagactgtcggcaagcccaggccaatcacacccttgacggtgccggcgagcatgaaggtgccgatcaccagcagtgtcagggcggggccgatattttggtagaacgcgaggaaggtattcatggagtgattgtgcggtttttcgatgaggtcgaaaattcgccatatactgaggcagactcttgtttatacagaggctggtgccatgcactttgacctgatagacctgcgcctttacctgcacatcttcgacaccggcaacatcaccgccggggcggcccgcagccatttgtccctggctgccgccagtgcgcgtatccgggcaatggaggcttcgctgggtatcgcgtttcttgaacgtggccgccgtggcgttacccctacacccgccggcaaagccctggcccgccatgcccgcctgctgctgcaacaggccgagcacctgcaacaggaccttgccgaatacgccaacggcatcaagggccaggtgcgcctgctgtgcaacaccacggccctcagcgaatacctgccggagttactggcagactttttgcgcgaacaccccaacctcgacatcgacctgcaggaactgccgagcctgcgcatcacccaggccttgcgccagggcacggcggaccttgggatcatttccgacgcggtagacacccacggcctgcagaccctgccgtttcgcgatgacccgctggtgctgatcacaccgctggatcatccgttcaccgcagggagctttatcgatagcctgcaacacgactttgtgggcctcgccgcccacagcgcgttgacggtttacctcgaagaacaggcattgcacgcaggtttccgtctgcaaacacgcatccgcgccgaggggtttgacggagtgatccgtatggtcgcccgcggcgccggcctgggtatcgtgccccaggcggcactggagcgctggccgctggaacccaccttcaaggccccccccctgcaagaggagtgggcctgtcggaaactgctgctatgtgcgcgctcgttcgaacagctgcccggttatgccaaggccttgttcgacgccttggccctgcccttgcggaagaacccgtaatacaccgccgacaggatcagcaggaacggcacgccaaacaccagggtcatcttgaatgcctcggtgaaataggtggtgatcatcaccgcgcccatcagcaccagccccagcaacgtgctgtagggaaacagccgcagttggaacgacaatttcggcccaccgtgacgcttgcggtagcgccggaagaacaggtgagtgaggaagatcatgaaccaggtgaagatcgcgccgaacatcgagatcgccatcatcagggtgaacgagctttccgggtataccacgttgagcaacgtcgccagggcgatgcccgagctggacagcagcaacgcgttcagcgggatgccgctcttgctcaaggtgcccatggacttgggcgcgaagccggcacgggacaggctaaacatcatgcgggtagtgatgtagagctggctgttcatggccgacaacgccgcgatcaggatcacgaagttcatcacgccggtagcaccgggaatgccgatggtctgcatcaccgtgacgaacgggctctgggtctgcccggcctggttccacggcacgatggccagcatcagcgccagggtcagcaggtaaaacaccaccaggcgcacgatggttgcacggaaagctttcttcaccgcctgttccgggtcggcggcttcaccggcggccacggcgatcatctccacactcaggtagctgaagatcgacacgatcactgcgatccacatgccgctcaggccatgggggaaaaacccctcgtgggccgtgtagttctgcacgccgtactccgggttgccggaaccgaacaccacgtataccgcaaggatgatgaagccgacgatggcgctgatcttgatcgtcgagaaccagtattcgaagttgccgaaggtcttcacgctgatggcattgagcaggatcagcacactggaaaacgacacgatccacacccattccggcacgttggcgaaccagtacttcatgtacatcgccaccgccgtaacctcggcgcccaccgccagcacaatcgccgcccagtaggcgtagcgcaccaggaagccggccagcgggctgatgtagaactcggcataggcgccgaacgagcccgaggtggaatgcgccaccgtcatctccgccaggcagcccatcaacagcaaggtaatcaatgcgccgatggcgtagctcacaagcacgctgggcccggcatacccaatcgcataggcgctgcccatgaacaacccggtgccaatggcgccaccgatggcgatcatgctcatctggccggaagtgagctggcgcctcaggcccagttcgcggtgggtgatctcggcaaagccggtgtctggcgtggtcacgtggtgtgcccctttattattgtgattgcactattgaacggttgtcacagattccctgtgggagggggcttgcccccgatagcggtggatcagtcaacgctgtattggctggcacactgcaatcgggggcaagccccctcccacatttttatctgcgttgtggtcaggtgacgctgttgcggactttgaattgcgcctggtcccaggtgcggttgtcgaggatttcacccaggatttccacagcgtcaaacacctcggtaaagcttgtgtacaacggtgtaaacccaaagcgcatgatgcgcggttcgcggtagtcaccgatcacgccacgggcgatcaaggcctggatcaccgcatagccttcggggtgttcaaagctcacatgactgccgcgccgggcgtgttcacgcggggtgatcagcaccagttcatgagcagcgcaacgcgcctcgaccaatgcgataaacaggtcggtcaacgccagggatttgctgcgcaaactcgccatatcggtctgggcgaaaatctccagcccacattccaccatggccagcgaggtgatcggctgggtgccgcacaggtaacgcgcgatgccggcactcggtgcgtacgtcgactccatggcgaactgccgggtgtggccgaaccagcccgacaatggctgtcgcaccacatccaccagcgccgggttgacccacacaaacgcctgggcgcccgggccgccgttgaggtacttgtaggtgcagccaatcgcatagtcggcaccggcctgatgcaggtcgatgggcaccgcgcccgccgagtgcgccaggtcccagaggctcagcgcgccgcactcatggctcagggcggtcagcgcctgcatgtcgtacatgtagccggtcttgtagttgacgtgggtgagcatcaccaccgccacatcctggtcgatggcctcgggcaattcatccgggctgttcaccaggcgcagggaatagccttgttgcagcagttcggccaagccctcggcgatgtacaggtcggtgggaaaattgctcgcctcgctgacgatcactttgcgatttggctggcgttggcgctgtacgctcaacgcggcgctgagcaccttgaacaggttgatcgaagtggtatcggtgatcaccacttcgccgtcgcccgcgccgatcaatggtgccaggcggttgcccaggcgctgggacaggtccgcccagccagcactgttccaactgcggatcaggccattgccccactcttcggcaatcaccgcctgagcccgtgccaatgccttcaccgggcgggcgccgagggaattgccgtcgaggtagatcaccccctccggcaacgcaaactggcggcgcaatggcgccagcgggtcctgatcgtcgagggcttggcagtggcttcgagtggtcatgggttgtcctggtttttataggtaaggatggaccaaataatgaacgaacttttagagaattttcgtgcaaagtggcgggcaacaggctaattaagctgtaggaaattcgaatttaacccccaaacacgcggatttattctaaccatgattctcgacgccaccgacctgcgcctcctgcatttcctgcaacaggatggccgcatcagcaatcaggaattggccgaaaaagtcgcgctgtcaccgtccgcgtgcctgcgccgtctgcgcctgctggagagcgagggcatcatcagcggctaccgtgcggtgttgaacgcggagcagttggggatcgagctggaggccatcgtgcacctgtcgttgcgccaggatgtggaggattggcacgagacgttcatcaagaaggtgcaaggctggccggaggtcgccagcgcctacgtgatcaccggcgccagcaactatgtgctgcgggtgcaggcgcgcaacctcaagcacttttcggactttatcgtcaaccacctgaaccgcacggcgggggtgatggatattcgctcggagattgtgttgcagaagatcaaggatcgggatgaggtgctggacttggtggtacgcaaataaccgcaacaccatcggtcaaatgtgggagggggcttgcccccgatgagggagtgtcagtggctgaactgttcaatgacacaccgctatcgggggcaagccccctcccacatttttgaatcgcgtttaatcttccagagcgcggactcgctgcatgcgtttctgctccaccggcgcctccgccacctgcagctcaaagtcaaaatcgatctgcgcaaaccgcccttccacgccaaactcctgcgccagttgcgggtcgtcgctgaagcgaatctcggcgatcaactcatcccgtgtcgcataggcaaagtcatcatgcaggtacgggtcatccgaaaggttgatctgcgtggtcaggtgccgatgccccggcgccgaaatgaagaagtggatatgcgccggccgctgcccgtggcgcccgagctgatccagcagttgctgggtcggcccggtcggtgggcaaccgtagcccgacggcacgatactgcggaaccggtagttgccttgggcatcggtctcgatgcgtcggcgcaggttgaactccgattgcgtcggatcgaaccacgagtaagtcccccccgtgttggcctgccacacgtccacaatcgccccggccaacggtttgccgttggtgtcgcgcacctgcccgcgcatgaacagcggcaccgcgtcgtccttgccatcgtccagccgcgcctcgacctttgacagcggcgccccggccacatacaacggcccttcaatggtgcgcggcgtgccgccggatttgccggcttcctcatcggcggcgtccatcagcaagtccaggtaatgctccaggcccagcccggcggcgagcaatccggcttcctggtgcttgcccaactcgttgaggtagttgaccgccttccagaactcttccggggtcacttccaggtcttcgatgatgttcacagtgtcacgcaggatccggtagatcagcgccttggtacgcgggttaccagcgtcgttgaggttgccgctggcttcttcgagaaactgttgggcatgggcagtctgggacagtcggatggacatggtgcattcctcatcttgtagttattcgtttggaaaccggcctagcggtcgtcgtcatggatcgacgacgggtgccggcacagggcgttcacttcgatagccatgtaggggaacagcggcagttgcatcagcaggtcatgcagtgcctgcacgctgtcgacatcgaacacgctgtagttggcgtagtgcccggcgatgcgccacaggtggcgccatttgccttcctgttgcaggcgctgcgccagggccttttcatcggccttgaggctggctgcacgctcggggttcatgtcgagcggcaggttcacagtcatttttacgtggaacaacatggcaggcgcctcttagtgtttgtcacgacggaagaacgccaggcgctcttcatcgatggccaggcccaggcccggtgcggtggagacatgcagctggaaatcgcggtacaccggcggttcggtgaggatgtcttcggtgagcagcaacgggccgaaaagctcggtgtcccacgccagtttgttcagcgtaaggaacgcatgggccgacgccagggtgccgatgccaccttcgagcatggtgccgccgtacaggccgatacccgccgcttcggcaatcgcggcagtacgcaacaccgcacgcgggccgccgttcttggcgatcttgagggcgaacaccgacgcagcgccttcgcgggccaggttgaacgcgtcctcgacacactcgatggattcatccgccatgatcggcgccgggctcgacaggttgagccgcgccatgccgctgcggttattgcgcgagatgggctgttcgatcaggtcgatgccattgtcgccaagcaccttgcacgcccgcagtgccaccgcttcgtcccaggcctggttgacgtcgacgcgcacgctggcgcggtcgcccagggtctttttgatcgcgatcacatgggccaggtcgtggctgacttcaccggcgccgatcttcaatttgaagaggcggtggcggcgcaggtcgagcatcttttcggcctcggcaatgtccttttcggtgttgccgctggccagggtccaggccaccggtagcgcgtcgcgcacacgcccgccgagcagctcgctgaccggtaggcccaggcgtttgccgagggcgtcgagcaaagcgctttcgataccggatttggcgaaggtgttgccacggatgctgcgctccaggcgcaacatggccgcgttgatgttgctggcgtcctggccgatcagcagcggcgcgaagtgacggtcgatgttgaccttgatgctgtcggggctttcactgccgtagctcaggccaccgatggtggtggcttcgccgatgccttcgatgccatcggcgcagcgtaggcggatgatcaccagggtctggttttgcatggtgtgcatcgccagcttgtgcgggcggatggtggggaggtcgacgataatcgtctcgatcgactcgatggcgcaaatcggcatggcaatacccgttgggttctttattggttttagccgattctgtgccgtatttttcaaggcttccaatatagaatgggtctcgcacaataccctaaaggtatcaaaggagccgtcatggaactgcgtcacctgcgctacttccaggtgctgggagaaaccctcaacttcacccgcgccgccgaacgcctgcacatcgcccagccgccattgagccggcagatccagcaattggaggatgagctgggcgtcattttgcttgagcgtgggcgaccgctgcgactgaccgaggccgggcgttttttctatgaacacgccaacgtgctgctggagcaattgaacaaggtctgtgacaacacccggcgcatcggccagggcgagaagacgtggctgggcatcggttttgcgccgtcgaccctgtacggcgtgctgcctgaattgatccgccggctgcgtacccatgaggcgttggagctggaactcgggctgtcggagatgaccaccttgcagcaggtcgaagccctcaaggccgggcgcattgatgtggggttcgggcggattcgcatcgatgacccggccattgtccaacgcgtgctggtggaggaccggctggtcgccgtcctgcccgccggccacccgttgcttgatgcgcccgccaccctcgcccaactggctgccgagccctttgtgctctaccccggcaacccacgccccagctatgccgaccatgtgatcgcgctgttcgacgcccacggcctgagcctcaaggtggcgcagtggaccaacgaattgcagaccgccatcggcctggtcggcgccggcatgggcgtgacgctggtgccggcctcggtgcaagtgctgcaccgcgcagacatcggctacacaccggtggtggaggccactgcgacgtcgccgatcattctcagccgacgggtaaatgaccagtcgccgggtctcagtcattgcctgcaactggtggaagagttgatctagccacgcaggcgccgcgcatcgttgcgctgcaaggtctggctcggcgactcatcgaacagcttgcgatactccgccgagaaccgcccaaggtgagtaaagccccagcccagggcgatttcggaaatggtgcgggtagagccgtgctcgaggatttcctggcgtaccgcgcacagccggtgcttcttcaaataggccatcggcgacagggcaaaatatttgcgaaacgcatcgaacagcttgaaccgcgacacccccgcagcagcttccaggtcttccaggtgcacggtgtcccgagcgttgtcatggatgtactgccgcgcacggatcaggtaatgcggcagtttcacgccgaggacatcgcgcaattcttcggagtagttgttcggctgggccaggatcaggcctttgatcagcgagctttccaggtcgcgggtaaaggcggcctgctcgtataactcgctgccgtgttccagctcggcgatgaagtagcgcgccatgcgccaccaggatgccgaagcaccgtccacggcgtccatcaccgactcaaagcgcagcggcgcctcaatcggccgttgcagcaaaccttccagtgattcactcatcgccgcccgcgtgatcaccacctgcagcttgcggcaatcaccggaaatcgccagcacctgatgctcgttgggcgagatgatcacaccctgatcgcggttggagaccaggcgctcaccgttcgtgctcaactcctgctcgcccaccaacggcaggctcaagctgtagctgctgaagtgctcggcgtcttcgatgtcgatggtcacgtcggtgccgtattcgatcacgcccagggtagtggcgcgggacttgaacacgttggcgctgtggtgaaagcgcaggcgctccggcgtattggtggccaggcgatggggcccgcaaatgcccgacatccagctgcgggcgccttccaggtcgaagcgttgaatcgtttggctgctcatcagggtgcacccacggcggttaggctgttgcgcgctctggcggcgcgtcgttgttgttcgacagcaaataatgcgccacgccggcgcaatggccagcgggtggatagcaatagtcgactaagtggataaaccaccggtttttccggccattgccctgcaagacagtagcgcatcccgtcaccttcctgcaccgggttgggtatttgctgcccaattatccggcgcaggttcccccactaagcggatagcccgcaccctgcaccactgcctctaataaaccaccgattagcccctatcaaaaaggtgcctcccatgagtggtgcaagaagcgtcgagcagtggaaaacgtttatcgaaggttgcctggactttcgcccggtggatgaagtgtttcgcatcgcccgcgacatgttcaccgagccggaactgttcgatctggagatggaactgatcttcgaaaagaactggatctacgcctgccacgaaagcgaactggccaacaaccacgacttcgtgacgatgcgcgccgggcgccagccgatgatcatcactcgcgatggcgaaggccgcctcaatgcgctgatcaacgcctgccagcaccgcggcaccacgctgacgcgggtcggcaagggcaaccaatccacgttcacctgcccgtttcatgcctggtgctacaagagcgatggccggctggtgaaggtcaaggcaccgggggaatacccggagggtttcgacaaagccacacgcggcctgaaaaaggcacgcatcgagagctacaagggctttgtgtttatcagcctggacgtaaatggcagcgacagcctggaggatttcctcggcgacgccaaagtgttcttcgacatgatggtcgcgcagtccgccaccggtgagctggaagtgctgccgggcaaatccgcctacacctacgacggcaactggaagctgcagaacgaaaacggcctggacggttatcacgtcagcaccgtgcactacaactacgtggccacggtgcagcaccggcaacaggtgaacaccgagaacggcaccggcgccggcagcaccctggactacagcaagctcggcgccggcgacgccaataccgatgacggctggttcgccttcaacaatggccacagtgtgctgttcagcgacatgcccaaccccagcgtgcgctccggctacgccaccatcatgccgcgtctggtgcaggagcacggccagcaaaaggccgagtggatgatgcatcgcctgcgcaacctgaatatctacccgagcctgttcttcctcgaccagatcagctcgcagctgcgcatcatccgcccggtggcgtggaacaagaccgagatcatcagccagtgcctgggggtgaagggcgagtccgacgccgaccgcgaaaaccgcattcgccagttcgaggacttcttcaacgtgtcgggcatgggcacgccggatgacctggtggagttccgcgaagcccagcgcgggttccagggccgcctggagcgctggagcgatatctcccgtggcagccaccgctgggcaaccggccccacgcccaacagcgaagccatcggcattcaaccggccatgaccggcaccgagttcacccatgaaggcctctacgtgaaccagcaccgcaactggcagcagttcttgctcaacggcctcgatcaacaagcgctgaaactgcgggaggtgaactgatgaatgccccattgcagtaccggatcgagcagttcttctaccgtaaatccgagctgtgcgacgcccaggactgggacgcctatgtgcagctgttcgacccgcagagcgagttccacctgccgcaatgggactcggagcacgtctacacccgcgaccccaagcgcgagatgtcgctgatctactacgccaaccgctcgggcctggaagatcgcgtgttccgcctgcgcaccggcaaggcggcatcggccacaccgatgccgcgcacgctgcatttgatcaacaacgtgcgcatcgccgaacaggcagatggcacgctggaggtgaagttgaactggcacacgctgttctatcgcctggccacgtcagagcagttttacggccacgccacctacaccctgaaacctgaaggcgacagctggttgatcacccgcaagcatgcgttgctgctcaacgacaccatcaactcggtgctggatttctatcacctttgacagccgactgtgacttgtagtgagcgggcttgccccgcgctgggctgcgcagcggccccaaaagcttgggagcgctgcgcactccagcgcggggcaagcccgctcactacagttataaaatccatggagaacggtggatgaatcacaaagtagccttcagttttgccgacggcaagaccctgttcttccccgtcggagccaatgaaatcctgctggatgccgcgttgcgcaacggcatcaagatcccgctggattgccgcgaaggcgtgtgcggcacctgccagggccgttgcgagtccggcgactacagccaggattatgtcgacgaagaagcgctgtccagcctcgacctgcaacagcgcaagatgctcagttgtcagacgcgggtgaagtccgacgcgacattctatttcgactttgattcgagcttgtgcaatgcgccggggccggttcaggtcaagggcaccgtgagcgcggtggagcaagtgtcggccagcacggcgatcctgcaggtgcagttggagcaggcgctggactttttgcccggccaatatgcacgcttggcggtgcccggcacagacagttggcgctcgtactccttcgccaacctgccaggcaatcaactgcaattcctggtgcgcctgctgcccgatggggtgatgagcaactacctgcgcgagcgctgccaggtcggcgatgaactggtgatggaagcgccactcggcgccttctacctgcgccatgtcaccaaacccttggtgctggtggcgggcggcaccggattatcagccctgctgggcatgctcgatgaactggccgtcaacggctgcgaccagcccgtgcacctgtactacggcgtgcgtggcgcagaagacttgtgtgaagcggcgcgcatccaggcctacgccgcgaaaatcccgggctttcgctacaccgaagtgctcagcgcgccctcggacgaatggcccggcaaacgcggctacctcaccgcgcatttcgacctggccgaattgcgggacagatcggcggatatgtacctgtgcggcccccctccaatggtcgaatccgtccaacaatggctggcggatcaggcacttgatggcgttcagttgtattacgaaaagttcacgcagagtaatatctgaccctcagcacttctgaggggtagatgcggcgtgcactccaccctgagaaaaacaagtagaagggaatgttaatggcggatgacatggttaacccggtgggcctcaagcgtggcctgaagaaccggcacattcagctgatcgccttgggaggggcgatcggcacggggttgttcctcggctcggccggggtactcaagtcggcggggccgtcgatgatcctcggctacgcgattgccggttttatcgcgttcctgatcatgcgccagctcggcgagatgatcgtcgaagagccggtggccggttccttcagccattttgcgcataaatactggggcggctacgcaggcttcctggccggctggaactactgggtactctacgtactggtgggcatggccgaactgacggcggtgggcaagtacatccagttctggtggccggagatcccgacctgggtcagcgcgctggtgttcttcgtggcggtgaacctgatcaacaccctcaacgtgaagttcttcggtgaagccgagttctggttcgcgatcatcaaggtggtggcgattgtcggcatgatcgtgctcggctgctacctgctgttcagcggcaccggcggcccgcaagccacggtcagcaacctgtggagccacggcgggttcttccccaatggcggcatggggctgttgatgtccatggcgttcatcatgttctcgttcggtggcctggaactggtgggcatcactgccgccgaagccagcgagccgcgcaaagtgatcccgaaagcgatcaaccaggtggtgtaccgcatcctgattttctacgtcggcgcgctgaccgtgctgttgtcgctctacccatgggaccaactgctgcagacccttggcgcgtcgggcgacgcctacagcggcagcccattcgtgcagatcttctcgctgatcggtaacgacaccgccgcccacatcctcaacttcgtggtgctgaccgcggcgctgtcggtgtacaacagcggcgtgtactgcaacagccgcatgctgttcggcctggccgagcaaggcgacgcacccaaatcgctgatgaagttgaacaagcaaggcgtgccgatccgcgccctggcgatttcggccctggtgacgatgttgtgcgtggtggtcaactacgtcgcaccgaagagcgcactggagctgctgtttgcgctggtggttgcctcgctgatgatcaactgggcgctgatcagcatcacccacatcaagttccgcaaggccatgggcgaacaaggcctgacgccgtcgttcaagaccttctggttcccgttcagcaactacctgtgcctggcgttcatggtgatgatcatcagcgtgatgctggcgattccgggcatcagcgagtcggtgtatgcgatgccggtgtgggtggggattatctacattgcctatcggctgcgggttcgcaggagccacgcggtagtcaacgcgcagtaatgcctgtgggagggggcttgccccctcccacattttgtttacagcgtggagcgtactcgccacaactcggggaacagcacggtgtcgagcatcttgcgcaaataccccacaccctccgtgccacccgtgcccggctggaagccgatgatccgctctaccgtcgtcacatggcggaagcgccactggcggaacgaatcctccaggtcgataaacttctcggccaattgatacaggtcccaataacggttcgggtcgcgatacacctcgcgccacgccgcctccaccgactcatcgtgaaccgtcgccgccgtcgggtcgcgctcggcacgtttcggatcaatcgccaggcccgccttgatcatcaggttgatcgcctcgtcatacagcgacggcgtggcaatcgccactttcaactcgttcaacagctccggccggtgggcatggggccgcaacaacgccgcgcttttattgccgaggataaattcgatctcacggtactggaacgactggaaccccgacgactggcccaggaacgggcggatcgccttgtactctgacggcgtcatcgtggccagcaccgcccaggcgtgcaccagttgatcgaagatccgcgacacccgcgccagcatcttgaacgccggtggcagctcgcccaggcgcacgtgttcacgggcggccttgagctcgtggagcatcagtttcatccacagctcggaggtctggtgctggatgatgaagagcatttcgttgtggtccggcgacagcgggtgctgggcgctgaggactttgcccaggtccaggtaatcgccgtagctcatggactcggaaaaattcagttcggcgttatgccattcttccggaggttggtaatcggcagagaagggacattggctcatcgcgtgggctccttgagcgggcggagaatggcgcggacagggctcgcgtcgaggttggcaaaacgcagcggcagggcgatcaattcatagtcgccctcggggacgtcatcgagcacgatgccttcaagaatcgccatgccatggcgcgccacggcgttgtgggaatccatggtcttggactgctgtgggtccagggatggcgtgtcgataccgatcaagcgcactcccaggctggcgagcaactcgatggtctgtggggcgatggcggtgaagttcgaatcccattcggtaagcggcgcttgtggataagtacgcagcaacacacgctcgggcacgttatccacacggccctccaactgatgcggctgcaccagcgcgccgctgtccaggcaatgcagcacgcggcacggccccatatacacatccaacgacacctcaccaatggccgcgccgtccgcgctgtaatgcagcggcgcatccacatgggcgccggtgtgcggcgacaaggtgatgcgcccgacattcaccggacattccgggccaaactgccatacgcgctcttcctggaacggcgtatcccccggccaggtcggggtcgccgtactcaagggcgggctgatatcccaccacgtttttattgggttcatttgcaggctctcggcggttactggggtgaatgatacgagggccggccgcgaattttcttgcgaattctggcgtgaagggggaaatctttcgcacttattgcgaggaaatagcggattggtgatgggttatatcaaataaacaccgctgcgcttctgggcatcccgatgtcgagttcagaccactgacgcaacgccccaggccttagtgtggatccttccattccctgcctcggaggcatcatgtccaagcccatcaccgtactgcgcgacacccaccccctgccggtcctggacgcctgcaaatgggaaaagctcgaaggcgacccgcacaccgtcaacctcaacgcctacaccagcgaagacggcagcaagatcatgggcacctggatctgcacaccgggcaagtggtacgtggattacgtgaagtgggaatactgccatttccaggaaggctactgcatcatcacgccagaaggcatggagccgattcacttgcgcgctggggatatctttgtggtggaaccagggatgaaggggacgtgggaagtggtcgagacggtgcgtaagtattttgtgtttgcttgaactggcaatccgctgatttcaagaacagaaaaccgcctgtaacggcggttttttgtgcgtttcagcggctcttgccagccaaggggcctgtcggctccatgtctttaccatgctcaatagctacgctgaaaaaccttttttgattggcagacgttgggccgccaagcttcttggcttcggcgcaaaacgtctcgacccattgcgtgtctgatttctggtttgtcgctttcattaacccaagcctctgtgagccttgtacatgcgcccaatactaggtgcgctcaactgaaatcacaaggcggtgcttttcgtcataggtgaagccaagtcgcttatacgtctgtacgacgtctggtcgtggctcctgaatttcgattcgagagcacccgatgacacgcgcgtatgcgtcgatggcgccgagggcaagcgcagcgatcaagcctttcaagggatgttcgctatctgagttaccttcgagaagcacaatcttgatcgtgactttactgtcacgaggcgttgcgtaacagaggccacatagttgctcatcgtgccagatcgacaaatcaaaccctttagcgtccaaggccctccaggccggaacatcctcccagggaaattgggcgtcacctccccagaggtaaaacgcctctatggcccgaccatcaatcacatcgaagcgtactttcgcagcgtcgagccactgatggcccaatgcattccactgctcgatgaatgaagccagtgccgcctttctcgattgagattgaaagaccaggtacttgagggagttcgagtatcgacgtgccattacgatcagattcttacgagtagagtggaaagatcagaaagccgcgttaacaacgaaagggcgcaaaccgtagcaagatcgggtgtagccttgggccaacgatgaattcaagatttttcaggcgtattcgtcacgagcaatggagccctccccatgacggctgaattcgacaggcaaaaaatcgtcatcttcaccggctctggcatcagtgccgaaagtggcctggacacgttcaacgacgaaaccggactgtggatggaccatcgcgtcgaagacgtcgctacgcccgaggcatggcatagacaccccgcggacgtgctcgcgttctataacgcgttgcggcacaaggcgtgggctgcgcagcccaatgcggcgcaccgcgccctagcggagttggagcagcagtttgatgtagtggtgattacgcaaaacgtcgacgacctgcacgaacgggcagggtccacgtgtgttctgcatctgcatggtcaaatcaacctggcgcaaagtacggtcgacgagcaactgatttacaagatcgacgataagccgatcttgctcggcgacacctgtgaaaaaggcagccaattacgcccgtatatcgtctggtatggcgaaaatgtgccaaatatcgagaaggcgctgcagcactttaaaaacgcagagaaagtgctggccgtgggcacatcactgaccactcaaccggccgcaggcttggttacgaaagccaggcactctgccgaaaaggtcctgattggactggctgtttcgcgtaagccctacggctacgaattcatgcgaggaaaggcatcaagcctggtgccttatgtggtgggatgctggctgaaaggccaaaaggctcgttaaccgcaaaaacccgggggcccactgaaggcaggctcccggaaacgcccctacttgggcttgcgatagctgttgatgatcgccgaaaagtccttgcccccttccccgcgctggctcatcgattgatacaactgttgggccacggcgcccaggatcacgggttgcttcgcctgacgtgccgcttcggtagccaggcccaaatccttgagcatcaggtccgcaccaaacccaccggtgtagccacgcgacgacggcgccgtttcgatcacgcccggccatgggttgtaggtgtcggaactccagcaacgcccggtcgagctgttgatgatccccgccaacacctgagtatcgatgcccaacgcgtcgcccaatgccatggcttcgctgacgccgaccatgctgatccccaacaacaggttgttgcagatcttggcgatttgcccggtacccacctcaccgcagtgcacgatgttgcggcccatctgcgccagcaccggttgcagggtagcgaacagttccggggtggcgccgaccatgaaagtcagcgtcccagcagcggcgccaccggtgccgccggagactggggcgtcggctacggttacgccttgcctggccgccgcagccgctacgtcgcggatggtttgcgggtcgatggtgctgcaatccaccgccggtacgcctttgccgatgccggcgagtacaccgtcttcattcagccatacgctgcgcacatgggcggcggcgggcagcatggtgatcaccagctcagcgtctttcgccgcatcgcgtggtgaatcgctgatggtgccgcccaactcggccaattccttgagtaccacctggttcaagtcgaacaggttcagcgcgtgacctgccttgatcaggtttcgggccatgggggcccccatgttgcccaagccgataaatgcaatcttcatggttgtctcccggaatcagcgcaggttgatggtggtgttgacgccatcgttgaccgtgtcgtcatcgaaccagcggctggtgacggtcttggtctgggtgtagaactgcaccacttgcttaccgtacgggccgaggtcgccgagcttggagccccgggagccggtgaagctgaagaacggcaccggcaccggaatcgggatgttgatgccgacctggcctacatcgatttcgctctggaatttacgcgccgccgcgccgctctgggtgaacaggccagtgccgttgccgaacgggttggcgttgaccagggcgatggcttggtcgagggtgtcgacttccagcaccaccagcaccgggccgaagatttcctcggtgtagatacgcatatcagtggtcacgcccgagaacagggttgggccgacaaagttgccttgctcgaagcccggcaccttgatgtcgcggccgtccagctccagcttggcgccttctttcacgccgctttcgatcaactccaggatgcgtgccttggcgcgcctggaaatcaccgggccgacatcggtgccggcctcgctgcccgcgttgaccttgagtttctgcgccagcgccttcagatccggcagccattgcttggacgcacccaccagcaccaccaccgaggtagccatgcaacgctgacccgccgcgccgaaaccggcaccgaccagggcattgagggtgtgctcacggttggcatccggcagcaccaccgcatggttcttggcgcccatcatcgactgcacgcgcttgccatgtttgccagccaggtcgtacacatgggtgcccactgccgtcgaaccgacgaaggacacggccttgatgtccttgtgggtgcacagcgcatccacgacatccttgccaccgtgcaccacgttgagcacgccagccggcacaccggcttccagcgccagctccaccagcagcatggtcgacagcgggtcctgctcggacggcttgagcacgaaggtgttaccgcaggcaatagccatcgggaacatccacagcggaatcatcgccgggaagttgaacggggtaatgccggcgcacacgccgatgggttggcgcagggtgtaggtgtcgacaccaccggcgacattctcggcgaattcgcccatttgcagggtgccgatggaacacgcgtgctccaccacttccaggccacggaaaatatcgccttcggcatcggcaatggtcttgccctgctcgttgctgagtaccacggcaatgcgcttggaatgttcgcggatcaaggcctgcagcttgagcatgatgcgcatgcgcgcgccgatcggcgtcagcttccaggtctggaaggcgcggtgggcggcgtcgatggcggcgttgacttcatcggcggtggcgaacgggactttggccagcacctcttgggtggcggggttgacgatgtcttgccactcggtggtcttggactcgacccactcgccgttgatcagcaacttgacctgttgcacggaaatatcggcagatgcgttcatgtggtctccaattcttatttatatgcagagaaccaaggccaggggtgtgctctcaatagctgacggtcgcgcccgcgtcccagcttaaatcgggttcagcctcaaatatcttcattcgggacttggccctgcgggttggagctgtgatcacaccagtccgcgttgcgggactcgaagaggcaaaggcatcctcttcgtcccgcgccttgactgatgcgatcacaactccaacgcgatccgccatctattgagagcacacccctatcgccttgaagaatgaggcgttcggactgtttttggagtatagatgtgcaaatctctaataagaacgcacataaaagccggaccaatatgcaaaaaaacatcacgtcgctgggctccctgaactgggatgacctgaagtttttcctcgaagtggcccgcacccgcaaggccagcgtggccgccaagcgcctggcggtggactacaccaccgtgtcgcggcgcatcagttcactggaagtgtccctcggcaccctgctgttcgaaaaatcccggaccaacggcttcgtcctcaccagcgaaggccagcgtttgctgggctacgccgagtccatcgaaagcaccctgcacatggcctgcgaacaagtctccggctccggcgtggcgctgtccgggcacgtacgcatgggttgcaccgaagggttcggcagcttcttcgtcaccccgcaactgagccacttcgtcgacacctacccggccatctcggtggacatcctgcccctgccccacttcatcagcctgtccaagcgcgaagccgacatcgtcatcgccctggagcgcccggaacacgggccgtatgtgtgctgcaaactgtgcgactacaagttgcagttgtacgcgacccaggaatacctggaccaacatccgcccatccgcaaaccttcggatttggccgagcatccgtttatcagctatgtggatgatctggcgttcagctcggagttgctgtacctggcaaacgtagtgcccggggccagtgccagtttgcgcagcaccagtgtgatcgcgcagtacgtcgcggcgcagcaagggcggtcgatggcgatattgccgtgctttctggcggcgcaggatccacggttgttaccggtgctgggggagcagatttccatcactcgccagttctggatgtattgccgggaggatctgaggaagttgaagcggattacgttgttgtgggactacatcagggaggtgacggagcagaatcaggggctgttgatgggggagacgcgggagatgcggtttgaaagggaccaagcaatagagaaacactgatcattcaaatttcgcgccacccgccaaaccatggcaattcgcctccatagctgataaaaagcagattactaaggaggaaaactgtgaaaatcaccattaagaaagattacaaatctattcctgcaggagttgagtttgacatcccagacttttgtgttttgacaggaaaaaacggcagtggcaaaagtcatatcctcgaggctatcgcaaacccaacactctcagatgtaagcctaaatggagcgagtacaaacaagatattacatgtagggtttaatggcctaaacccacaagtagacgagcaatgcgactcaacccaagtactgcaaaacgttaacaactggtggaaccagatacttggaattatcacacactacaaacagatttcacaaaacggccaaagattcaacaatatatttactgaatacttaccccagcacggccccaaccctgtcttatactcaataataaaacaaataatggaaaagtcaggaaaaaacctagaaaatctaaaccaggaggacgttctaaacaatattagcttcgtcgaaaccagcaacaacaccttgtttttttcccaatgcgcgatgatctttaaggcatatcacactagacaggtaaagaatgagttctccgaattcagagccgcaaaacatagcggtactggaattcactttctcagccaaaaagatttcatatcaaaatatgggcctcctccatgggaactcatcaatgagatactagcccgagcaaaactaccctatgaagtgtcgaaccctgaacttgtagattacgacctcccttatcaacttagacttatcgacaaatctaacaacgtagatatttcggtcaacgacctttcatctggcgaaaaggttttaatgtcgttagcattagcaatttacaacacacaagaaggaggaactcgcccagacatcctgctactcgatgagccagatgcacccttgcacccccaattttctaaacttcttatagatatactcatcgagacaatagtgaggaaaactggcgtcaaggtaattatcacgacccactcgccctcaacagtcgcgatggctccagacaacagcgtgtttgaaatcaatagagacactaaagtcccattcatggttagcaactcccatgcagtcaatacattgaccgaaggaatagacttcctaaaagtatcattcgaaaagagacggcaaattttcgtagaaagtaaatatgacgtccaatattttgagcgccttttcaaccttgctcggcgtagatgtgatttttcataccatccaattttcttagagcctcatagtggatcatcgaactgcaccgatgtcatcagcatagttaacagactatactcaacaggaaacgatctcgtttggggaattattgacttcgataccaccaatacaccatcagacagaattgaagttcttggaaccggaaaaagatacgcagttgagaactatattttagatccactctatgtgtgtttaagcctaatccgatcagcaaaaaaaacatatgcagactttggagtaacaggaagcgttgcgacgtatacagaagcgatgaacctcaaagaagaagagtgccagacgatagtggacaacttcttaactcaaatcaatcttccgctagccgaacttactcccacccgactagataacaattacaccatcaactaccctaaatcttttctattacatcaaggacacagctacgagactctactaatgaatcgtttcccagaactgaagtcaatatctcgaggcaatggcgattcagcattgaagttaggagtgatgcagacagtcgaagagtaccctcagttccttcctagagagatcttcgaaaccttttccagagtcttaaatgattagtagctcaagcgttggtagcagacaagtgaagctgttaatacctaaagtcagatacctcaagaaaattccctttaaattgcaggatatttcctagagaatctccacagtattgcgtcataggatttgagtgtctagcctcctcgggtcgctgcaaacagcgactgggtttagcgacccgagaaacgtaggttcgacctcctcaactcatttggccggcgtttttgcctgccttatcgtgttatggcggctgtgcgcgggagaccttcggggtctaccgggttccctaggttaccggttcgctaacctgcgtacagctgccacctctccatgtttagcgacgtgccgtggcggtttctacttgttaacctaaggaaaaaccatgtccaagatcgtccccgatccaccgctttcctccctcaccaccctcggcgtcgtcaccttcggcgattacggcgaaaacgaaaaacccctgttccgcgtcaacgccggcatgcccattgaggaagcgttagagcacgcctccaccctgcttttctactccaagaaactcgcgatggaagccgccatggatgtacgcggcgagcaatacgcgtgggccgcgcattacctgtgtgagatgggcaaagccgtcgttgatgacctgacccaagccatgacgccaagccgttaagcgcacgcagctcaaatgtgggagggggcttgcccccgatggcggagtgtcagaaccccatgtactggctgacccgcagctatcgggggcaagccccctcccacattttgattgcatttcaggttgggactgggcgaaacctatcagtccgcaatcaccacaatcgacacccgccgattctccgtgcgccctgccgccgtatcgttggacgccaccggctcgctgctacccagcccgcgcagttgaatgttttcttccttcatacctacaccggtcaacaccgtcgccacgctttttgcgcggcgcagggacagttgctggttgtaggtttccttgccggacgcatcggtgtggccgtcgacgcgcacgcgttcgatgcccacgcccagcagggctttgccgatgcgttggacgatgtcggtgctgggttggttgagcgtctcgacgtcgctgccaaacagcactttgccggacaggccgaaggcccagccttcgtcggtcagttcaaagccttgctgcttgaggaccgcgacttgtgccggagtgaggcctttgggtggggcggtctggcaaccgccgagggcgagcagtgccatcagcagggtgataaacatgaagcgcgcggttgtgaacaaggggtcaactcctgtgttgaacgttgacgacggggttctccgactccgccgtttgctggccgcccgaggacaagcgcttggcctggtacatcgccgcgtcggcggcattgagcaaggtgccaggtgtggcgccatgatcggggtagatagcgatgccgatactgagggaggtcaatacctgcgtgttgccgggcacagggatgggcaggtccatgctggcgatgatcttgtcggcgatacgctgcgcgtcttccaccttgtgcaacggcgccagcaggatggcgaactcgtcaccgcccaggcgcgcgaccaggtcatcctcacgcagttgagcacgcacgcgctcggccaccgctacgagaacggcatcgccggcggcgtggccgaagctgtcgttgatctctttgaaacggtcgctgtcgaggtagagcaccgccagttgttccttggccttcgccgcactgcgcagcgcacggatcagacgcccttcgaagaaggcacggttgggcaggccggtgaggctgtcgtgattggcctggtgggcgagggattcgttttcgctttgcaggtggttttgccaggcttccatctcgccgagcaaggcattgaagtcgctgcccaggctgtccaactcggcgattcgcgccggcggcacgcggcggtcgaagtcgcgctcgctacgggcagcgtgggccacggcggcgaggctttgcagtgggccggtgataccgcgcaacaagcgtcgcgccaagtgcagagcgatccaagcactgagcgcggtgcagatgaggatcccggccaggccgctgagcaggaagcgcaagaggctaccgccgtgaccggtgaggtgagtgctgccgatggctcgcccttggtggaggatcggctggctaatgggttgttcaagcagggtgtgcgccagttccagttcaacccgcgagagcatgccggtatccggacgtatccactgcgccagcaacttgccattggcgtcgaagacttcggcctgggccacttcttcggtggaggcgatcaggctgagggcctcggtggccgccgcgctgtcgttgaacaccaccgccgcttccacggtgtagttgatggagcgggcgatcaggtgcaggttgtgttcggcatacacccgcaacgccagcacgcccagcagggtcagcgagatgctggccagggtcaccgccaccagtgccagcatcaggtgccctcggccgatgaccgagcgcaatgtcggtcgcacagtatcggccctcatggcgcaggcgctcggcgacgggacaactgcagcacactggggtgaatacgcacgccgctgcgcgccacggagtcgaggttgacctcaaaggacacttgctcatcactcaccctaaggcagaacaggctacccacggtgcactggtcgccgccttcgctgatgctgagcaccgggtgaccgatcaaggaggtgaacaactggctacgctcatcgacactgagcttgccgatgtacaccgcatcgcacgcgttgacgatatcgggatggttggccagcaggcgctgcaccaccaccggacgaccggtggcctgggtggtgcctttgatcaggtcgtcggtgtattgggtggggccgacgatgcacaggcgcaattgcgcaggctcgaccggccagcgcgcataactgaggataccgagtaccacttgggtgactgcctgggcgcgctgggcggcgaggtccgcaggggcgggcgcctgggcgaaggtgtgtggcgcgagcacacacagcaccgccaccagcagcaggcgtctccagctcaaactgcgctctgtgggcgagacagccacgttcatgcagcgattctctcaggtgttttttagatgatgccgcaacgatagcacagcggcgcaaaaccccgcgaagagtaggccttcgcgggggccgctatttttccagaaaaatcagtcgactgaatcagaaaaatgacatgacctgtcagtcagttttttccggttcgtggcctaattccagcatcaacccactcaagcgcttgaccttgcgcctgaccgcctcttcaaacacgccgcctcggggctcgatcaggctgaaccagcgcttggcccgcgtgatgccggtatagatcaattctttggtgagcaccgggttcaatgcatccggcaggatcaatgcggtgtgggtgaactcggagccctgggatttgtgcacggtcatggcgtacacggtttccacatcgttcagacggctaggcagcacaaatcgcacaccgccctgaccgtcgttgcgtgggaaggcaacgcgcagcacctgggggccgccgtcgctttcgggcaatttgagggcgatgccgatatcgccgttcatcaggcccaggccgtagtcgttgcgggtcatgagtaccgggcggccttcgtaccactgctcgtcgccttcgatcaaacgcaccttgcgcagggcggcagtgatgcgcaggttcaggccttccacgccccaagggcctttgcgtaccgcgcagagcagttggaatgcatcaaaggcgtgcagcagttgttgcgcccagtgggtccaggcgtcgctttcgcgcggggtatcaagtgacggacgggcgctttgcagcaggttcaggtaatagcgataaccgtgggcaccatcaccctgcccgtccagcaccaggcgctccagggcgtggtcgtgctcgcccttgaggctgatgcagaacaggtcactgtgactgcgcgccgccagcagcttgcgcgcctcttcggcattttgctggttgacccaacgcgccagttggccgatgccactgccctcgccgaaacgccgcgagtaacgcagcatcaccacttgttgggccaacgggtggctggcgtcgaggtcttcctgcaggccgctggcgctgaggtcttcgccgctgaccgattgcagccattggcgggtctcggcgctgtagaagccagcttcggcgtcgcggcacaagtcaccgagcacggcgcccgcctctaccgaagcgagttggtccttgtcacccagtagcaccaggcgtgcatggggcggcaaggcgtcgagcaggttggccatcatttccaggtcgatcatcgaggcttcgtccaccaccagcacatccaaaggcagcgggttaccgaggtggtggcggaagtgccgcgtgcccgggcggctgcccagcaggcggtggacggtggtgacctgggtcgggattttttccttcacgttgtccggcacattcagcgacagcacttgctggctgatggactcggtgaggcgtgcggcagccttaccggtgggcgcggccaggcgaatgcgcaacgggctgccagcctcaacggccggcgcttgcagcaacgcgagcaggcgcaccacggtggtggtcttgccggtgccggggccaccggtgacgatgctgaatgcaccgcgagtggccagggcgcaggcgagtttttgccagtcgatcacgccgtccggcggcgcctggtcgaacaaactgttcaagcgctgcggcaaatcggcggcgactttttcctgggtggcgaggcgcaggcgcaaggcgctatcgatgcgccgctcgtaggtccagtaacggcgcaggtacaggcgtttgccggacaggaccagtgggcgactctgggcggattcgctgccatcggccgccaacgcgaccaaatgactggcggccaaagcgtggcaccagtgggcgccgtccagcccctccagcaactgcgacggcagcagcatggcgccggtttgcaggtcaccttcaggcggcaacgacagggcgaagtcgggtgccttgagcgtttcgaacaggtcgaggcagacgtgaccatggcccaattgatggctggtcagcgcggcggccagcagcaccagcgggtcagtctgtgggtcgagttcgtgcaggaagccgacgaaggctttgtccaacgcacgcaaccaaccgcgatcgacccaacgctccagcaattgcaccaggtcggcggcgcggctgaggggcgtcagctcctcaagcggtaacggcgacaggctcataacagcactccttgttcccaggcgggctcaaccttgggcgggatgggcttgccctggaacagcaggtcgaggctttcgatgagctctcgtgggggccgggtgaaatacgccccctggctagcggattgagtgccgcgcaggaaaatgtacagcgcaccaccgacatggcggtcgtagtcgtagtccggcaggcgcgccttgagttggcggtgcagggccagcaggtaaaggacgtattgcaggtcgtaccgatgctcaaggatcgactgttccatggcgtccggtgtgtaggcggaatcgtcggggccgagccaattggatttgtaatcggccacgtaatagcggccgccgtgctcgaaagtcaaatcgataaagcccttgaacataccgttgagcaacaccggttcggcggcaacgcgggagacgccgttgtgggtgtattggcatacaagcttgtcgagggcgagtacgtcgactttgtggctggcgaaccagaactccatctcgatctggtactgctgcaacccgctgagggaaacgtgaccgttttccaccggcaatggcgtttgcagcaggtggccgagccagctgctgagggtgatgatccagccttcccaattgcgccggttgcagcgagcgcccaccgccttttcgattgcctcgggcgtaacgttaaaaccgtcctccccggcccattccagcaggccgtgcagaaaggttcctgggttagggccgcgtgggaaacggtgaatatcgccgccggacgccaccacttcgcggggtgcgtcggggtcgagacgctcgtcatcgaacagcttttgggcctgtgggctttccggtgcttcgagaggggcggcgctcatgctgtcgccgatgcgcaaggcgctgtaggaagcaatccaccagttttccgccgccttacgcttgggcaacaagggcgcccgcagtgtggcgacgttaagcggtggatggaaaaggacgtcttgcgcttcgggcaccagggcgtagttgattgcagtgcaaccttcttgaaggtccaggagccagcccgccaaaccggcggattcacccagcgatgcgccggcgccaagcaaatagcccagtgccgaaaggtgcagtacggagctattgctattgccgcgcttgaggtcggcgatgcccagccaacaggcatgtttagcgcgggtcagggcgacgtagaacagacgcaggtcttcggcgaggcgctcgttgtcggccttggcgatcaactcgggcgtcgggcgcaggctgacctgggatttgccgttttcatcatggtagtgaaggggtaagcggctgccatccacgggtttggctgagcaaatgaatggcaggaaaaccagatcgtattccaggcctttggacttgtggatagtcaccactttgaccagttgctcatcactttccaggcgcaggatctgttcctcgcctgcctggcccgaaagcgccaggtgttcggccagatggcggatcagcgcctgttcaccgtcaagctccgatgcggcctgttgcagcagttcgctgaggtggagcaggttggtcagcacacgttcgccatcactgcgcgcgatcagggtttgcggcagtttgaagtcatgcagcaagcgccgcagcatcggcagcacgccttgggtgcgccagattgcgcgatagccacggaactgcatgacgcggctttcccacgccagttcgtcctggttcagacgctccagttccggcaaagacaggttcagggtgacgcaggccaacgcggcacgcagcgggcgctccacgtccggttcggcgcaggccttgagccaggccagcaggtcgtgggcttcctgggcggcgaagaccgaatctttgtcggacaggtaaacactgcgcacacctcgggcagccagttcggcgcgcaccgcctgggcttccttgccgtcgcgcaccaggatggcaatgtttgacggcagcacgcctttgaagctcgcgtccggttgcaggaaaccggcagtgccttgttgcccaccgttgagcaattcaacaatgtgcgtggcacaggccgccgcaagttgctgacgatacagcacgttggaaatcggctgatcggtaggcaagtgccagaggttcaacgccggcaacgtgtgcccatcgacctgcaagtgttccttgcggccttgggacagcaccgaatggaacggcacggggttttcgccatccggctcgcggaacaggaacgcacctcggcccgtttccgcacgctggaacacatggttcaccgcctcgaccatcgcatggctggagcggaagttggtacccagggtgtgatggcggccggtggtggactggcgggcgcgcaggtaggtgtagatgtcggcgccacggaaggcgtagatcgcctgcttggggtcgccgatcaggaacaggccgctgtcgaggtggttttcttcgatgcggtagatgctgtcgaagatgctgtattgcaccgggtcggtgtcctggaattcgtcgatcaacgccaccgggaactgctcgcggatcacgctcgccagacgctcgcctccctcggattgcagggcagcattgaggcggatgagcatgtcgtcgaagcccatttcggcgcgtcgacgcttttcctcttcgaagcgtttgccgacccagccggcggcgtgttgcaggactgcggcatcgggcgtcggcagggcgtcgagggcggccttgaggctggccatcgcgtcgataccgggatgctgcggcggttcgcccttccaggcttcggccatgccgtcgggtgtcaggcgagtgaagccggtgccgatatcgagttgttcgagggtgtcgtcagcagcccaggcgctgatcttatcgaaccagggctcgaagtaacgggcttgcatcttgcgaccatcgacggctttggccgccacggcttgcaggcagatatcacgtagctcggcggcccattgctgccacggcgccttcagttgtaccagcgcttcacggcgttcttgcaggcaggcgttgatcagctcggcgggctcgcgggtctcatcggcgggccgttcgctgccgaacagcgcacgtacccgaggcatcaacgcggcgggcccgccccagttgttgcgcacccagttgagcgcatcgtcgtgcatcgggtagcagaacagccgccagtagtcgcgcagcacttcaccaagcaggtcgctgtggtcggtttccagggtctgggtgaacaggctgccactgtcgaaggcgtgctcgcgcagcatgcgctggcaccaactgtggatggtcgaaacggcggcttcgtccatccattgcgcagcgatgtccaggcggttgccgcaggcgggccattgttcgagcgggtattcatcgcgtagatcggcgatcagagcgtcgggctgttcaatttcttcgcggaagaagcgtgctgcttcagccaggcggatgcggatgcgttcgcgcagctctttggtggcagcatcggtgaaggtcactaccaggatttgcggcggcagcagttcgcggtcaaagcctgattcatcgccaccgtggccgaggaccaggcgcaggtagagggcggagatggtaaaggtcttgccggtgccggcgctggcttcaatcagctggctgccgttgagcgggaaggccagggccaagggtttgcgggtcatgcgccggcctcctcaccggtgagtgatcgccagggggcgttgagcagggggcgatacagggtttcgcaccatccttcgaattcttcgctggcgatgagtgtggcgtagtcggggaattgccgggtgagcgctggggtttcgcggcgctcgccttcgttattgagcccgtcaccttcataggctttactcgcagccgcttcggccttggctggatcggtttggccgagccacgcaaacgcggttttgacggcaaggggtagcggtttgctcatccctgtatgccaggccagcagtaggttgccgaggatttcctgggcatgggctcgatccagcggtggcagcagcaaggtgtcgtcgctggccaccaaggcggtgcttagcggcaggccgcaggcgcaggccactacgtgattgacccagggccgaatcaggcgatgccacttgcgggtcttgatcgaaccgatgctgttggggatggtggtgacgctcagcaacccgccatcactgcgtcgatgcagcccgctgatccagccttccaactgaatgccgcgatgctcaaaactgatcggctcggcgccggggtgcggggtgggccagagggccaataattgttggtagcgttgcagcaggccaggcaagggttcgatcagttcgttgcgcaggcactcgccgaaacccaccatcggcaacaggccactgccttgtaggcgcaaagcctgggcgttcagggcctggtcgaagtgatcgggctcggtgagtgctgcgctaagcagactgtcgctcaggctgtagcgttgcagtgcgtcgagcacgaagggttcttcgtcagccagcggtacttcggcggcctcgaagaacactttcagccgttggctgaagaagtgtttgaccgggttacgcaggaagtcctgaagctggccgaggttcaggggctcgtcctgttgatgaggtgccaggacgggttctgttgcggtggcatcggctgcctcgtggagcaactgccattcgcgggcatagctgaacagcacatcgccctcatggaagtagcgagcgctgaatggttgcagtgggtgctcttgagtcatggcatcgatcagcggctcgtcactgtcagcggagtgccagccactggccagatggtcacgcagttggccgatcaacaccgaggccgggcgatcactgttgtcgcgaatgctgcggccaacccagctgatatagagctggtcacgggctgaaagcagcgcttcgagcagcaggtagcggtcgtcttcgcggcgtgaacgatcaccggggcggtagtcactgcccatcaggtcgaagtccagcggtggttgagcgcgcgggtaatcgccgtcgttcataccgagcaggcacaccagcttgaagggaattgcacgcatgggcatcagtgtgcagaaattgacagccccggcgaggaagcgttgggacaggcgcccttgatccaaacccgccaaccaggcttcacggactacggtgaggggtaagtcatcgtacaggccaacggactcgcaggtttccagccacgtttctctgagttgttcgagttggcccaacaggtagtcgtcgtgttcgctactcggcaggaaaaacagttgcatcaagcgttgcaggcgttcaccccactccttggcgggagcgggttgcgacagggcttggtgcgcatcgttgagtgcgtcgagcaaggcgaccaacgggccgatcaggacagcgtcgagtccaccgatttcgtcgtaaggctcgataccggcgcacgctgcgccggtgcctacggcgtaaccgagtaacatgcggcgcaagccgaaacgccaactgttttgctccagctccgttggcaggccgaggccggcacgttgctcggcgttgagcccccagcggatgccggcgccttcgatccagcggtgcaacgtgggcaggtcgcgctccttgatggcaaagcgttcgcgcagtgctggaacgtcgagcaagtctagaatttcgctgacggggaagcggctgtcggggagtttcagcaggtgttcgacggcaatcagcagagggtcgcggccgcgttggccttggtcggtcagggtgaacgggatgaagcgtgggtcgttgcgctcaagctggccgaacacggcgcggatatgcggcgcgtagctgtcgacgtcggggaccatgacgatgatgtcccgggggcgcagcgtggggtcggcgctgaagcgttggagcagttggtcgtggaggatttctacttcgcgttgggcgctgtgggcgatgtggaagcggattgaggtatcgcgctccagatccacggcgggccatagctcgcgggtttcattgagtgggcgcagttcgaggatatcgtcctggagttgattgagcagtgttgtcggctcgctgtcgctgaacaggtcgatgcgaccgtcgcggaaagcggcgcggtagctgttggggtcgtcatagctgtccagcaagctgatgtagtcacgaccttgtttgccccacgcggccaataacggatgggcatgctggtgcagggtttgtgggtcgatggtgaccggcatgcccgctttacgcgcctgacgcttgtattcgttacgcagcaggtctttgtcggcgacgatgtcagaccaatggtgtcggcaagggttgtgcacacagagcaggacttggctgaagcgcgcgaggccggcgagggcttccagcgcctgggccggcaacgaggagatgccgaaaacgatgacgcgggatggcaggccctcgggcgctttttccagggtattgatgcgctcgataaagcgttggtgaacgcctgcgcgactttcggccatgccttcttcaccaacatccaatagcagcgcgcgccatagttcggcttgccagcagttggctgggttaaggggtttggattcacctcgaccgttacgcaactggtggcggccggcggcccagtcttccagccagtcggcgcggtagacctggtattggtcgaacaggtcagccaggcgctcggcgagttggtagcgtttacgcaggtcggtgtcgtgggtgaggaagcgctgcaacggttcgaagtgcggctgatcgataagctccgggagcaggcgcatcaggcgccaagtcagtggggctttatcgagcagggatttgggcgggatttcatctttgcccaagaccatgcggtagagctgccacataaagctgccgggcagttgaacatcgattgctgcggcgatgccgcaaccgcccatgtcgtcgtcttccggatcttcagccagggccagcttgagccactgggcgatgccattgctttgtaccagggcgatttcgttttccaagggtgccaaggggtagcggcgcatccaactgaccactaggctgcgaagctcgtccaggcggttgccgtgaaccaccatgaatccagcactaagggacgtcgcatccggcataacggcttccttgggaaaggcaaaatcgagggtgcgactttagcactgtggacagttgttggccgaattgggatgttagctgtcttttcgaccgcccaaaacaaaacccctgactgcgttagcagtcaggggttctggaatttaatcttgacgatgacctactctcacatggggaaaccccacactaccatcggcgatgcatcgtttcactactgagttcgggatgggatcaggtggttccaatgctctatggtcgtcaagaaattcgggtactgagtcgtggcctgggcctcgcttcagcaaattgggtatgtgacagctttcggtgttttgtgaacgtcgaactttcggttcatttcgtcttcacacaccgcaatctgatgctcgttagagtagtcaaattgcttgggtgttatatggtcaagcctcacgggcaattagtattggttagctcaacg

SEQ ID NO: 16 - DNA, 341470 bp, Pseudomonas nodulensis
  misc_feature (114008)..(114084): n is a, c, g, or t
gaattctacagcgttacacgctgctgtcaacacctctttttctccgctttcgaccgagaggatcgaaacgttaatagagccagacaacactgctctaccaactccttctgggcttcgataaactgaagcaagtcgctgtcgaattctgcgtaactctttgtttaccaaggagtttttcgtttcgactgcgccggaagtggggcgaattatagacttccagaatctgccgtcaacccttaattacgcttttgttgcagaaagtggttttttcgcaataaggcgcgggattctccgcattacgggcggtatccgtagcaccaacagcaacgcacctatagaagtatagatagcccattccttgaggtccgctcgcacgatccacaacatatgcagcaaacccagcccaagaattacatacaccaagcgatgcagcttcttccaacgagtccccaaccgacgttgactgtaacgattcgacgtcaccgccaaaaccaacagggaaacaaaccccagcgccccgacaataatgtagggccgcttgcgcagctccaccccaagttgcgaccaatccagcccaagcacaaatacacaataagcagccagatgcagcacaacgtacgcaaagcaccacaaccccagttgccgacgcacggctatccaccccggccaaccgctgagcttctgcagcggcgtcattgccagggtaatcagtaacagaatcaacgtgccaagccctagccgatcgaccagtaccttgcctggatccggccccaggacagaacgccacgcttcatagagccaaaacagtggccaaatcgccgctgctataaagacgccaacgcgccagatcggataacgcatcagtagttcttccgcagatcgagaccggtataaagagaggccacctcatccgagtacccattgaacatctgcgtctcacgtacattaggactgaacagcccactcggcagacgacgctcccgcgcctgagtccaacgtgggtgatcgactgtagggttcacattcgcgtagaacccatactcgtcagcagcgatgctctgccacgtggttttcggctgctcactcaccagactgatccgcacaatggacttcacactcttgaagccgtacttccaaggcaccaccaggcgcagcggcgcaccattctgattgggcaactcacgcccatacatacccaccgccaggatcgccagaggattcatcgcctcatccagacgcaagccctccacataaggccaatcgatcaagccaaaactcgaacgctgccccggcatgcttttgggatcctggagggtttcaaaacggatatacttggccttcgaggtcggttcaacttgcttgagcagcgcggagatgggaaaaccgatccatggaataaccatcgaccatgcctcaacacagcgcagacggtagatccgctcttccaactgatagggcttcatgaagtcttccaaggcataacggcctggcttagcaacctcgccatcaataacaacgctccacggctcggtcttgagtgaaccggcattcgtggccgggtcacccttacctgtaccgaactcatagaagttgttgtagtgcgtagcgtctttgaaaggcgtgatcgcctcgtccttcaccgtgactgcctgccacttggtgcccggcagcttctcggcaaaccaactcggcgccctgcccgcttcaacatcggcatagcgcgacacctcgtcggcaccggccaaacgcggcaagctgctggctgcaatgccggcaagcgcaccgccgagcaagctgcggcgagagagatagaaggattcaggcgtgacatccgactcatggcaatcggacgctttgggtaatttgattaacatggcaactccgcagcattggaggactgatgcaccaatagactgcggagtatgggggaaattacattaaggcaatgttttgtcccggcgcagatgcagcaagtactgaaccggccccgaagcggcgtacaccaggaacgccagcaacaggatgcgcggcggatcactgaacaccacggcaaacaccagcacaactgccagaatcgctacgaaaggtacacgccccttcaagtcgagttccttgaagctgttgtacttgatgttgctgaccatcagcatgccggcagcggccaccatcaaggccaccagaaacgacatcttcgacccctggatgccgtaatcactgaaggcccagacaatacccgccaccacacccgcagcagcagggctggccagaccgatgaagtaacgcttgtcggcagtccccacctgggtattgaagcgcgccaggcgcaaggcagcaccggcaacatagatgaaggcaaccatccagccaaccttacccatatcacccagcgcccaggcaaacgccagcaatgcgggggcgacgccaaacgcaaccatgtccgacaacgagtcgtactcggcaccgaatgcgctctgggtattggtcatgcgcgccacacggccatcaaggccgtctagcaccatggccacgaagattgcgatggcagcaaaaccgaaatacttgctggcgctcgccgcatcacccgctgccagggcactctgtgcgctcatggagttgatgatggagtagaacccggcaaacaggttcgccgtggtaaacaggttgggcagcagatagatgccacgatgccggaccttgcgaccttccgcgtcatgcccttcctcaacatgttcatcgatcggcagcaggctttcggcgtcaggagcctggcttggctcttcgggacgttcgctcatggactttaccttgcaacggtgtgaaaaaagttcgacagaaacttgcggccagtgttcgcccgcaaacgatgcagctttataccagaacccgccgcccaaacgaaaaaacgcggcctaggccgcgttttcccttgatacgtacgacttagttcttggctttgtcgacgatcttgttggcaccgatccacggcatcatggagcgcagctgctcgccgatgacttcgataccgtgagcggcgttgttacgacgcttggcagtcatcgaagggtagccggtagcgccttcgctgatgaacattttggcgtattcgccgtcctgaatacgtttcagggcgttgcgcatggcctgacgggactcggcgttgatcacttccgggccagtcacgtactcgccgtattcggcgttgttggagatcgagtagttcatgttggcgataccgccttcgtacatgaggtcaacgatcagtttcagttcgtgcaggcactcgaagtaggccatttctggcgcgtagcccgcttcaaccagggtttcgaagccggcttttaccagttcgacggtgccgccgcacagtacggcttgttcgccgaacaggtcggtttcagtctcgtccttgaaggtggtttcgatgatgccggtacgaccgccaccgacgccagcagcgtaggacagtgctacgttcttggcgttgcccgatgcgtcctggtagatcgcgatcaggtcaggaataccgccgcctttgacgaactcggaacgtacagtgtgacccggcgcttttggcgcgatcatgatcacgtccaggtcagcgcgtggcacgacctggttgtagtggatcgcgaagccgtgggagaaggccagggtagcgcccttcttgatgttcggctcgatttcgttcttgtacagcgcggactggaactcgtccggggtcaggatcatgaccaggtcggcagcagcaacagcggaagcaacgtcagtcaccttcaggccgtgggcttcagccttggcaacagtggccgagcctttgcgcaggccaacggtcacgtcaacgccggaatctttcaggttgcacgcttgcgcgtgaccttgggaaccgtagccgatgatggcgactttcttgccctggatgatcgacaggtcacaatctttatcgtaataaactttcatgaggttcctctatatatccaggccgtaaggccattcgctaatttgggttagatgctgagtactttgtcgccacgggcaatgccggtgacaccactgcgtaccgtttccagaatcgaggccgtcccgatcgactggataaagctgtccagcttgtcgctcgtaccggtcagttgaacggtataaacgctggcgctcacatcgacgatctgcccgcgataaatgtcggtcgtgcgcttgatctcggcacgttgggcacccgtagccttgactttaaccagcatcagctcgcgctcgatgtgggcactctccgacaggtcgaccagcttgaccacttcgatcagcttgttgaggttcttggtgatctgctcgatcacctcatcatggcctacggtggtcaacgtcagacgcgacagggtcgggtcttcggtcggggccacagtcaggctttcgatgttgtagttgcgttgcgaaaacaggccgacaacacgagacagagcgccgggttcgttctccagaagcagggagataatgtgccgcatgattaagtacgctccgtcttgttcagccacatgtcgcgcatagagccgtctttgatctgcatcgggtagacgtgctcactggtatccacctgaatatcgatgaacaccaggcggtccttcatggcgaacgcctcttccatcttcggcttcagatctttcagatcggtgatgcgaatgccgacgtggccataggcttcaaccaattttacgaaatccggcagcgactccatgtaggagtgggagtgacggctgttgtagctcatgtcctgccattgacgaaccatgcccagcacgccgttgttcaggcagacaatcttcaccggaaggccgtactgcaggcacgtcgacagttcctggatgttcatctggatgctgccctcaccggtgacgcacgcaacgtcagtgtccgggaagctcagtttcacacccatggccgcaggaaaaccaaagcccatcgtgcccagcccaccggagttgatccagcggttaggtttgtcgaacttgtagtactgcgccgcaaacatctggtgctggcccacgtcggaggtcacaaaggcgtcgcccttggtcacttcgcacagggtctcgatcacggtttgtggcttgatgatgctgccgtcacccttgtcgtaagggaacaggccgcgatcaccgcgccattcgtcgatctgcttccaccagcttgcaacggattccttgttcggcgtctcaccgatgtccttgagcgcggcaaccatttcggtcaacacgctttcaacaggacctacgatcggcacatcggccttgatggtcttggagatggacgccgggtcgatgtcgatatggatgatcttggcattcgggcagaacttgctcgcgccattgatcacacggtcatcgaaccgcgcgcccacggccaggatcacgtcggcatggtgcatggtcaggttggcggtgtagctgccgtgcatgccgagcataccgacgaactgacggtccgtacccgggaaagcgccgaggcccatcagggtgttggtgaccggcaggttgagcagcttggccagttcggtcagcggtgcagaaccgccgcccaggatcacaccaccgcccgagtacagcactgggcgcttggccgccaacagcatttctgccgccttgcggatttgccccgaatgcccgcggaccgccgggctgtaggagcgcagcttggctttcttcgggaagatgtattcgaatttttcggccggattggtcatgtctttggggatatcgaccaccacaggacccgggcgaccggactgtgcgaggtagaaggcctttttcatgacttccgggatttccgaaggatgcttgatcatgaagctgtgtttcacgatcggccgggagataccgatcatgtcggtttcctggaatgcatcggtccccaccatggtgctgggcacctggccggaaatgaccaccatcgggatagagtccatatacgcagtcgcgatgccagtgatggcattggttgcgcctgggccggacgttaccagtaccacgccggctttaccggtggcacgggcataaccgtcagccatatgggtcgcggcctgttcgtggcgaaccaggatgtgggtaacagccggttccttgaacagtgcgtcgtaaacatgcagcagagcaccacctgggtacccgtagatatagtcgacgccttcgtcacgcaaaaagcggacgagcatctcaccgccagataaaagctccacgttgttcacctctaaaacgccagaataccgtccgttgaaaaccgacgggtcttaataggtttacttctcaacagagcatgagcgacggtggtcgccgactacgtcagcactgactgagcaagtattgggatcgtcccaagtgttgcgggcttttcccacccagcgcgaggtaacgcgttgcgggtgtaacaggtcggcgcggatgtgcgcctcatgatctgctgagcgggcctgcttctggcagtcccgatacagcggactttggattcttctgtttcaggcccttcaagtcaagcaataattgcgcttttttccaactaagcgcatgagaacgtagaagaaagggctttgaggagggataaaactcgcctgaatgtcgtcaagcggtagaaatgtgcgcaagactgccgaaaaaaccgacagtcaggcaattaacgagcgtcgacgatcagttggtcgaactttttcagcgcattacgtaagccaaggctttccagcgggcgatcggcgtagaccatctcggccatttccagaatgcccgacgcattgggcagcggcaggtcctgctcgaggatctgcttcatgcgcaccaggaatatccattgcagccactggtgaaagtccagcgtgtccaccgaaaagggttcgacgctgctgagcgcctcgacgctgggggacacctcgtcccaccagccctgcacacgcaactctcgttcgatcagcagcaactgttcggcaatggcgggaaaccgtgcatccatcagaggctgaccttggctttctggcgcgcctgggcggcaccggcggcgtcgccttgcgcggcacgcgcgtcaccaatcaaggcccacaggctggcttgcaggtctggacgaccgttggccagggtcaggccacgacgggcgaattgctcggcctgcggcgcgtcgccctgggccatgcgcacctgggccaggcgatatagcacttgcggttcacgcggcgcaacgcgctgggcacgttcgagactcgaagacgcaccgttcagatcaccacccgcctgctgttgctgggcagtggtcaacagggccagcaccggcccgtccaattgctcgtcagccgacaggccgccgccgctggaggacgagggaatgccactcggcgtcgatggcatgttgtaggtgccctgggtggccggggccgtctgaatcggcgtggtatcgatcggacctgagttgctcgggccaggggtccacggctcggcgctgattggtgccgatgtggccgcaccaccgccaggcaccatcaccaccacgcccgaatcctgcggcacagcttgcggcttggcctgggcgggacggttggtcacggtctggcggaacccgccattggccgagatccggtcgttattggacacggtcgtgctcgagtccaccacgggaatggagccgcgctgcacgctggcgcaaccattgagcaaagccagagctgtaatagctggaatccaccacttgttcacttgaaaccctctttgcttaattcatccagcccttgacccaatccatcaccgattccgcgtctgcaggggcactgccaccgcatgcggcgccgggtggcggttcgctgccgcgaatatacggcatctgtactgcgcccggacagttggcatcggagccctgcccggtgtgcggatcgatccaggcctgcacgatgttgtccggctgcggcatgttcaacggcagcggatcggccttgcgcatgaaactggtccagacctgcaacgcaccggtggcgccggtgaacggtgtcttgccgttgtcgtcacgccccatccacaccaccgccagcacatcctggccaaaacctgcgaaccaactgtcgcgcgaatcgttactggtgccggtcttgcccgccagtgtcaggttggacggcagcaccttgtagaccgaactaccggtaccctcacgcatcacacgctgcatggcgttctggatcaagtagatggagcctgcatcgaaacgctgctgaatctggaacggataacgcttgagcggctcgccttcagcggtcagcacgctgcggatcccgcgcatcggtgtattgaaaccaccgttggccagggtctggtacatcgtcgcgacttccattggggtcattgcgccagcacccagcaggatcgaagggaacgccgggaactcacgcgtaatgcccaggcgcccgagggtcttcaggacgtttggcactcccacttcgaggccgagacgcgaagtagagatattgtaggagtgcgccaacccctggtacaggaacacggtcccgtgggagcgacgatcaaagttctgtggcgtccacacctgcccgtccgcgcctttcactgacagcggatcgtcagacagccaactggtcagggtgtacttgctcggtttttccagagccgtgaggtagaccgccggtttgaccagcgaaccaatcggccgcaccgcatccagcgcacggttgaaaccggcgaagctggccaggcggctgccgaccagggcctggacctccccggtttccgggttggtcacgaccatggccgcttcgacttcatccgcgcccttacggcccgtcatacgcttgaacgtgtcattgaccgaggcttcggccttcatctgcaggatcgggtcgaaactggtgaagatccgcaggccttcctcggtcaagtcttcgtcgcggtagtcttcacgcaactggcgcttgaccaggtcgataaagcccgggaaagaactgtctgccagcttgccgcgggtagtgacacccaatggcattttcttcgcggcagcaacttgttcagcggtggcaacaccttgctgctctaaaacatccagcaccaggttacgacgctccagcgcacgctcggggttgcggcgcgggttgtagtaggaaggccccttgaccatacccaccagcaacgcaacctggtgcagcttcagttcggaaagcggttggccaaagaagaattggctggccagaccgaaaccatgcaccgcgcgctgaccgtcctggccgacgaatacttcgttgaggtacgcctcgaggatttcctgcttgctgtagtgcaactccagcagcatcgccatcatcgcttcggtgagtttgcgggtcaggctgcgttcgttggtcaggtagaagttcttgaccaattgttgcgtcagcgtactgccgccctgggtcatcttgccgccggacgtgttcacccagactgcacgggcgatcgatttcggcgagacgccccagtgatgatagaaatcacggtcttcaacggcgaccagggtttccagcaggtaaggtggtacctgatcgagcttgatcaggatgcgatcttcaaggttcttcgggtaaataccaccgatcatcaacggttcaaggcgaaccacaggcagcttcgagccgttgagagatgataactcggcgacgtaatcgccggagaaacgcacgcgcaccggctgggctttttccaggccttcatagaactggaagccgcgggtgttcaggtcgacggtatttccgctgacagccgctgcacccggaccgttgctcacgggctcacgacgatagcccaaggcgtcgagttcggtcaggaagtcatccttgctcagcttctggccggtgaacaattccagcgggcgcgcgtacaccttggccggaatggtccagcgcttgccggagaacttctcctgcaccacagcgtcgaggtagaccgcaaagccggcaagcaccacaaggcctaccaggccaagcttgagcgcccagccaagccaggggcgcaggccacgggaaggaggttttttacgggaacggggagatcgggttcgagtcatggcggcggattatacgcactttattgatgatcaacatgagccggacagcggtttgcacaagcggtcgcagcagccataatgcccgccatgtttttccccagactctgaaggatcgcccgtgagccagtccctgatcgctgccctgcaaaatccggctttatacccccatccggttgaagcgttccaagtcatcgagacccatatttcctgggtcgtactgaccggtccttacgcctataagctaaaaaaaccgatgaacttcggatttctggacttcaccgatctggaaaagcgtggccatttctgcaacgaagagctgcgcctcaatcagcgcctgaccgaagatttgtatcttgaagtgttgccgatcaccggcacagccgaagccccgcaattgggtggcgatgggccggttatcgaatacgcactgaaaatgcgccagttcccgcaaagccagttgctcagcaccctgcaagccaatggcgaactgaccagcgcgcacatcgatgaaatggccaagcagatcgcgcacttccatctctctgcaccaaaagtgccacagcagcacccggccggcacgccggatgaggtaatggctccggttcgccagaacttcgaccagatccgcccattcctcagcgacaaggccgacctggcccagctggaagccttgcaagcctgggccgaaagcagcttcgagcgcctcaagccactgttttcccagcgcaagcaggacggcttcacccgcgaatgccacggtgatattcacctgggtaacgcaacgttgatcgacggccacgtggtgatcttcgactgcatcgagttcaacgagcccttccgcttcaccgatgtgtacgccgataccggcttcctggccatggacctggaagaccgtgggctcaagtccctggcacgtcgcttcatcagtcagtatctggagttgaccggtgactatcagggcctggaagtgttgaacttctataaagcctaccgcgccctggtccgcgccaagatcgcactgttcagcatgccgagcgaggccagcccggtgcagcgcgccacgaccctgcgccagtaccgcaactacgccaacctggcggaaagctacagcaccattccatcgcgtttcctggccattacccacggcgtttcggctgtcggtaaaagccatgtggccatgcgcctggtggaagcactgggtgcggtgcgcctgcgctcggacgtggagcgcaagcgcctgtttggcgagcaacaggtggaaaacacaccacaggccggtatctacgcggccgacgccagtgccgcgacctacgcacgcctgaacgaaatcgccgataccgtgctgcgtgccggctacccggtcgtgctggatgcgactttcctgaaacgtgaacaacgcgatgcggctgccaaagttgccgaagccacgggtgcgcctttcctgattctggattgcaacgccccacaagccgttattgccagctggttggcgcaacgtcaggcggacaaaaacgatccgtccgacgcaacactgactgttatcgaagaacagcaagcccatcgtgatccactcaccgccgaggagttgctcctcagcaagcgcgtcgagaccaatgaaagcgggaccctcgacgcactggtggcgcatattcgccagcgtctgccaggcctgtaagaaaaatttcttggtcgtgtcgcctacttggggcgcacgaccgagcaatagtggcactataatggcgtcataaatccaacgggagtcgccgtcatgagtcagcccaagcttcttgatactccgctttactcgctcctgcataaagacgatgtccgaggcttcaaccaggaacgcccaaaagacggtgtcatcgacatgcgcggtggtgacttccgcgggctggacttgcgcgaactgaacgcggcgggggtggactttaccgacgcctatttccgatctgccgatttgcgcgggctggacctgcgcaactgcccgctggagggcgccagcctggcccacgcgcagatttccggcacgtacttcccgccggaactgagcgctgacgagattctcatgtcggtcaatttcggcacacgcctgcgctatcgcactcgctgacccctcctgcttctgccccggtttcgcacaggcgtgccggggacttcccgcctgcctgacctcatcatgcttatacgtctttaggccgtttccgactaaagaactacgcttttcctactgagcgctacacttctgttcaggcttgcctggttacgatacccaccgcaccattcggccgtcgcaaggaggcttgatgaacgatgagctgcaacacctgaaaaaccttggcaagacgtcagcacagtggctgcatgcggtgggcatccatagtgcatccgacttgcgtcgcctaggtgcggtcgatgcctaccgggccgtgcggacgcgcgggtttcgtgcatcgaaagtgcttctgtatgccatcgaaggggcattgatggacgtgcattggaatgacattcctgccgaacgcaaggaagcgctgaaccgtcaacttgacgctatttcaacgcgccaaaagaattagatcgactatcaggccccatgtttacagacattccgaacgcgcgtttgagaaaacccgcagacactgagaaaacaaaggttgactctcaaatgagaatcgttatgattatcacaactggtcgcgagatcagccgataattgaaagaccattggttcggactctcagattatctcctcatcaggctaatcacggttatttgacccggcttttgccgggtctttttttgcctatggaaaagccggattcagcgcgcaatgatcagaggatgtccgcgctcgggatgggcctgcacaagcacatccagaccaaacacagctttcaagggctcaggttgcatcacctgcgccggcgtatccaaggcatgcgggcgccccgcctccagcaacagaatacggtcacagtaacgggctgcgaggttcaagtcgtgaaggatcaccaacaccgccgccccacgatcggcgaaggtacgaatggcctgcaacgtagtgtgttgatgcaaagggtccagcattgacgtcggctcatccaacagcagcgtctgccccgcttcacccggccataattgcgccaacacccgcgccaagtgcacccgctggcgctcgccaccggacaacgccacatagctgcgaccgctcaagtgcccaacatcagccgcctgcaaggccgcctcgataatctcatcatcgcgcacgcgtccagtctggtggggcaagcgccccatgccgacaacctcttcaacacggaaagcaaagtccagtgtcgagctttgtggcaacaccgccaggcgctgcgctcgttgtgccccactccactcctgcaaaggacgttgatccaggcacaccttgccttggtccggatgcaactcgccgcacagcgcaccgagcagcgtactcttgcccgctccattgggacccagcacgccaagcacttcacccggcaacagatcaagcgtgacatccgccaacacgattttgcgaccacggcagatctgcaagttttctacacgcagcatcaggcacgcccccgcaacaacaggtaaagaaaaaacggcgcgccaataaacgcagtgacgataccgattggcaactcagccggcgccagggccagccgcgcaaccagatcggcaaacaacaacagactcgcacccgccaggaccgatgcaggcaacagcacccgatgatccggccccgccagcaaacgcaccagatgcggcaccaccaatcccacgaacccaatcatgcccgcagccgccaccgccgcgcccacacccaaggcggtgcagaagaccaattcacgcttgaggccctccacatcaataccgaggtgattggcttcagactcaccgagcagcaaggcattcagcgcgcgagccctgcgcggcaaccacagcgccacgcccgcgctcaccagcaacagcggccataaccgtgaatagctggcgccgttgagactgcccaggttccaaaaagtgagggtacgcaatgtcgcgtcgtcggccaggtaggtgaacagacccaccgctgaactggcgagagccgtaagggcaatacccgcgagcagcatggtcgcgacgttggtctggccgttgcgccgtcccagccgatagaccagcgccgtcacacccaagccccccaggaatgcgcagagtgacaacagatacggcccgaacgcatccggcaaaccgccgaaaaacgaaccgccgacaatcgccaccgccgcccccaaggcggcaccgctggaaacccccaccaggcccggatcagccagggggttgcgaaaaagcccctgcattgccacaccggacaaagccaacacaccgccgaccgccaaccccagcagcgtgcgcggcaaacggatctgccccaggatcagctcagcctgctccagcccttgcgcctcgatcggcaaccccatcaaacgcagcgcggccttgagcgtatccagcaaaggcaggctgaccggccccagtgccagcgaaagccagatcgccaagacacacaacagcaccagcccaataaacagcgtcttcggtttaaccaaagtcgtcatggggcaggcttggcttgggaggggtaaaacccggcagacaggtccgctagacttcgcggcaggcgtggcccgagtcctccaaccagcaaggtggggtcgacttcaaacactcgcccgctcttggccgccggcgtggacgccaggatcgggttttccttgaacagcgccgcacgcgccgcatcgccgctgagggcacggtcagcaaacaccagcacatccgggctcaagcccgccaatgactccaccgaaaacggcttgtaaccttcatgggtcgccagattgcgcccacccgcctgctgcaacatccagtcagccgccgtgtctttgcccgcaatcagcggcttgccgcccgcgtgcccgagcaacaacaacacgcctggcgccttttgcgtggactgggccttgctcacccagcgcttctgctgatccagtgcctgctcatatccggtaaacaattcgttggccttggcctcgctgcccagcaacttacccaggtgttgaagattgcctttcaatgtaggcagatccggttgcgccgagaacatctccacctgcacgcccgcgctgcgaatctgcgccagcactggcggtggccccatttcttcggtgccgaccagcacctgcgggcgcagactcagaatgccttccgccgacaactgccgctgatagccaatgctcggtaacgccttgagggattcaggatgctggctggtggtgtccaccccgaccaatttcgactcaccgcccagggccgccacccattccgacagtgccccaccggcactcacccaacgttgtggcagttcagaggcttgcgccccgtggttgaccagcagtccgacaacaagcgcaatagcgctggtactcaggcgcataacagggtttccttccaagggcagggccgctcaagcactcatcaatgtgacagcaaacgcccgtctggcatcgtattgagcgcccggtcagctgacgggcgaagccggcatttgataattgtttgcatttgaacgtcaaggcacttaaggattgcaatgaagtttctctgcccctccaccgcactcgcgcccaacagcagcctcggttttgacatcgacgggtgcaagctgctggccgtgcgccgcgacggtgttgcgtacttctacatcaaccgttgcccccatcgtggcattccactggaatggcaacccgaccagtttctcgatgacagcgccagcctgatccaatgcgcgacccacggcgccctattcctgatcgagaacggcgaatgcatcgccggcccttgcgccgggcaaagcctgaccgccttgcgcggctgcgaagacgcccagggtctgtgggtggaactctagtcgagcagcacgtccaggcgtcggtccacacagatgtcttcgcaggtcacccgcacgccatacgctagcacttctacccccgccgccttggcttcacgcaaggcggcggcgtaacccgcgtcgatttccaccgcaggtcgcacggcctcaatccccgagagattgacgcagtacaactgcaccgcacgcacaccctcccgcgccagatgcgccagctcgcgcaaatgcttggcgccacgctgggtcaccgcatcgggaaacgccgcaaccgcagagccgtcaaagcccagcgtcacgcttttgacttcgacgtaggccgcaccgtcgggataatccaggcgaaagtcgatgcggcttttctcctggccgtaaggcacttcgcgtttcaacgcggtaaagccgttgagctcagtgatcacccctgcatgcagcgcctcctcgaccagttgattggcgcgcgccgtgttcacacaggccaaccgcccttggggcgtctcggcgatttcccaagtgccgggcaatttgcgcttggggtcattggagcgactgaaccagacttgtccgccttccaccatgcaattgagcatcgagcccgtgttggggcaatgaatagtcagcaactcaccggtaacggtctcgatatcggtgagaaaacgcttatagcggcgaatcaggcgcgcttcttcaaggggaggattaaagcgcatcagccttgccagctccgcagaccacgggcaatccgctccactgcttcttgtagccgattgaggttttgcgtgtaggcaaaacgcacatgatgaccggcttggtagcgaccgaagtccaggccaggcgtgaacgccacatgctcggtttcaaggaaatgacggcagaatgcgaaggcatcaccgccaaacgcgctgatatcggcatacaaatagaacgccccttcaggctcgaccgcgatgccaaaccccagctcgcgcaaagcgggcaacaggaagtcccgacggcgaccgaactcagcacggcgctcttccagaatgctcagggtttgtggggtgaaacacgccagcgcggcgtgttgggccatgcttggcgcgctgatgtagaggttttgcgccagcttctccaactcgcccactgccgccggcggcgccaccagccaacccaggcgccagccggtcatgccgaaatacttggaaaaactattcagaacgaaagcctcgtcgtcgacttccagcacgctggccgcgtcggtgccgtaagtaaggccatggtaaatctcatccaccaccaaatggccattacgcgccttgatggccgcagaaaggctagccaattcgtcacggctgaggatcgtcccggtcgggttggctggcgaggccaccagcgcgcccacactgtcctggtcccagtgcttggccaccaggtcggcggtcaactgatagcgcacctccgggccgaccggcaccaactgggccgcgccctctaccaggcgcaggaagtgacgattgcacgggtaaccagggtctgcgagcagccaatgcttgccagggtccaccagcaagctgctggccagcaacaatgcgcctgaaccgccgggggtgatcaggatacgctcggggtcgacgttcaacccgtagcgctgctgatagaaaccgctgatggcctcgcgcagttcaggcaggccacgggccgcggtgtagcgagtcttgccgttggctaatgcggcctggccggcctggatgatcggctcggcagtggtgaagtccggctcgccgatttccaggtggatcacatcatggccggcagcctgcagctcattggcccgcgccagcaatgccatgacatgaaaaggttcgatggcgcgactgcgcgcactgtagggctgggccattagccttccttaacggtgaggacaaaatctggattctaccgaacccacgccgtaaaacatgttctattgcctgcccgacagcagatgcagtccgggcaagcgcctgcaaaacgactaaaatctacattcgaggcaacacatacccagcaatggcgggctgtcgcagtttgcaaccgctttgccgtgggcctcgacaaccgggagtggcgcaccccgaatctatctggtaagttcgcccgcttgcagccgcagggccggcaggtgtcggtgacgttgcaatcctgcgcaatggattagaagagtgagaggcggtctattcatgtccacccaagcaaagcaacagcagactcaaggcctcaacggcttcgaaccttacgtagagacgaaaggtgaggagtacatgggcgagcccatgcgcgagcacttcaccaagatcctgaacaagtggaaacaggacttgatgcaggaggtcgaccgtacggttgaccatatgaaggacgaagcagccaacttccctgaccccgccgaccgtgcgagccaggaagaagaattcgcccttgaactgcgcgcacgtgatcgcgagcgcaagttgatcaagaagatcgacaagacgctgcagctgatcaaggacgaagaatacggctggtgcgaatcctgcggcgtcgagattggtattcgtcgcctggaagcccgcccaactgcggacctctgcgtagactgcaagaccttggccgaaatcaaggaaaaacaagtcggcaagtaatccagccgagctgaacgaatggggcgtacgaacgccccatttttgtttctggcgtttaccgaatttccagtagtatccggcccatgacagcctctacctatatcgggcgttttgcccccacgcccagcggccatttgcatttcggctcactggtcgccgccctcgcctcctacctcgacgcccgcgccaaccaaggccgctggctcatgcgtatggaagacctcgacccacctcgtgaagagcccggcgcccaggcagcgatcctgcatgcactggaaagttatggctttgaatgggacggcgaactggtccgacaaagcgaacggcacgaagcctacgccaaagtgctgaacgatatgttcaaccacggcctggcctacgcctgcacctgctcacgaaaacaattggaagcctacaacgggatctacccaggcctatgccgcaatgccggtcacgatcagcaggacgcggccatccgtctgcgtgttcctgagcttgcctaccactttaccgaccgcgtccagggcgaattccgacagcatctgggccgcgatgtaggcgatttcatcatccgtcgccgcgatggcctctatgcctatcaattggccgtggtcctcgacgatgcgtggcaaggtgttaccgacatcgtgcgcggcgccgacctgctcgactccacgccacgccagctctacctgcaggaactgctgggcctgcgccagccgcgctacctgcatgtgccactgatcgtccagccggacggtaacaaattgggcaagtcctaccgctccccaccgttgacacccgaccaggccacgcctttgctattaagggccctgcgcgccctcggccagcaacccggggaagaactcgagtacgcccacccacgggaactgctggactggggcatccagcactgggacgccacgcggataccgcgcacactcacgctggccgaagcgcaattgagctgaaggcgcttgcagcttgccaagcatccgttaccatcgccgcacgtttttacacagaggccaatatgtacatctatcgattggtcctgctgctggtcgtcgggatctacctgttttcccccgccatcatggattggtggatcgacgccacgggcgcctggtatcgcccttatctgctgtggttgatcctgatcgtcgtgactttcatcctgcagagccaaaaagatgccgatgagctttagcctcacccagatgctgctgatcagcgccgcctacctggccgcgttgttcggggtggcctggatcagtgagcgcggaatgattccgcgggcgatcattcgccatccgttgacctacaccttgtccctcggcgtctacgccagcgcgtgggcgttctatggcaccgtaggcctggcctatcaatacggttacggctttctctccagctacctcggggtgtccggcgcgtttctgctggcgccggtgctgctgtacccgatcctgaagatcacccgcacttaccagctgtcatccctggccgacctgttcgccttccgctttcgcagcacctgggccggcgcgctgaccacgattttcatgctgatcggcgttttgccgttgctggccctgcaaatccaggcagtagcggactccatcagcatcctgacccgcgaaccggtgcaacatcgggtcgccctggccttctgcgcgctgatcaccctgttcacgattttcttcggctcacgccatatcgccacccgcgaaaaacacgaaggcctggtgttcgcgattgcctttgagtcggtgatcaagctgatcgccatcggcggcgttggcctgtacgcgctttacggggtgttcgacggcccgcaacagctggaactgtggctattgcagaaccagaccgccctcgccgccctgcatacgccattgcaggaaggcccctggcgcacactgctgctggtgttcttcgcttcggcgatcgtgatgccgcacatgtaccacatgaccttcaccgagaacctcaacccgcgctcactggtcagcgccagctggggtttgccgttgtttctgctgttgatgagcctggcggtgccgctgatcctgtgggcaggcttaaaactgggtgccaccaccaaccctgagtatttcaccctgggcatcggcattgccgcgaacagcccggccttggcgctactcgcttatgtgggcgggttgtcagctgccagcgggctgatcatcgtgaccaccctggccctctcgggcatggcgctcaaccacctggtattgccgctgtaccaaccgccggccgagggcaatatctatcgctggctgaaatggacgcggcgcgcgttgatcgtcgcgatcatcatggccggctatggtttctacctgctgctgggcgcgggccaggacctggccaacctggggatcgtcgcatttgtcgccaccttgcagttcctgccgggcgtgctgtcggtcctgtactggccgacggccaatcggcgcggcttcatcgccgggctgctggcgggcatcctggtgtgggtcgtgaccatgctgctgccgctggtcggcaacctgcagggcttctacatcccgttactgaacatgatctacgtgctggatgacaccagttggcacatggccgcgattgcgtcattggccgccaacgtcttgatgttcaccctgatctcgctgttcaccaacgccagcccggaagaaaccagcgccgccgaagcctgtgcggtggacaacgtgcgccgcccgcaacggcgtgagttgcatgcggcctcaccccaggagttcgccacgcaactggccaagccgttaggtgccaaagccgcacaaaaggaagtcgagcaggcgctgcgcgatctctacctgccgttcgatgagcgccgcccgtacgcgctacggcgtctgcgtgaccgtatcgaagccaacctgtccggtttgatggggccgagcgtgtcccaggacatggtggaaaccttcctgccctacaaggccggcggtgaaaactacgtgaccgaagacatccatttcatcgaaagccggctggaggactaccactcgcgcctcacaggcctggccgccgaactcgatgccttgcgccgctaccaccgccagaccctgcaggaattacccatgggcgtatgctccctggccaaggatcaagagatcctgatgtggaacaaggccatggaagaactcaccggcatcgcggcgcaacgtgtggtcggctcacgcctcaacaccctcggcgagccgtggaaagaactgttgcaaggtttcatcaatctgcccgacgagcatttgcacaaacaacacctggccctcgacggccagacccgctggctcaacctgcacaaagccgcgatcgacgagccgctggcccccggcaacagcggcctggtgttgctggtggaagacctgaccgaaacccagatgctcgaagacaagctggtgcactccgagcgcctggcgagcatcggccggttggcggcgggcgtggcccatgaaatcggcaatccgatcaccggtatcgcctgcctggcgcagaacctgcgggaagagcgtgaagaagatggcgaaatcaccgagatcagcgggcagattctcgaacagaccaaacgtgtctcgcgcatcgtgcagtcgctgatgagctttgcccatgccggcgcccaccagaaccacgacgaagccgtgtgcctggccgaggtggcacaggacgccattgggctgctggccttgaaccggcgcaatttcgaagtacagttcttcaatttatgcgaccccgaccattgggtcgacggcgactcccaacgcctcgcccaagtgctgatcaacctgctgtccaacgcccgtgacgccaccccggccggcggtgccgtacgcgtcaagaccgaggctttcgaacatacggtcgatctgatcgtcgaagatgaaggcagcggtattccacagaacatcatggaccgattgttcgaacccttcttcaccaccaaggacccaggtgaaggtaccggtctgggccttgcactggtctattccatcgttgaagagcattatggacaaatcaccatcgacagcccggctgacaccgaaagccaacgcggcacccgtattcgggtgaccttgccgcgtcatgtcgaagcgacgtccgctgtgaactgagaccgtcgagagaattgaatcaatgccgcacattttgatcgtcgaagacgaaaccattatccgctctgccttgcgtcgcctgcttgaacgaaatcagtaccaggtcagcgaagccggctcggtgcaggaagcccaagagcgtttcagcattcccacgttcgacctgattgtcagtgacctgcgcctgcctggcgcgcctggcacagagttgatcaagcttggccagggcactccggtgctgatcatgaccagctacgccagcctgcggtcggcggtggactccatgaagatgggcgcggtggactacatcgccaagcccttcgaccatgacgagatgctccaggcagtggcccgtatcctgcgtgaccgccagtcggccagcagcacgccggccgagcaacgcccggcgggcaaaaccaatgacaagccaggcgtcgacaacagcaacggcgagatcggcatcatcggttcctgcccacccatgcaggacctgtacagcaagatccgcaaagtcgcgcccaccgactccaatgtcttgattcagggcgagtccggcaccggtaaagaactggtggcccgtgccctgcacaacctgtccaagcgcgccaaggcgccgatgatctcggtgaactgcgcagcgatccctgaatccctgatcgagtccgaactgttcggccacgaaaaaggcgcgtttaccggcgccagcgccgggcgtgcgggcctggtggaagcggcggacggcggcacgctgttcctcgacgagatcggcgaactgcctttggaagcccaggcgcggttactgcgtgtactgcaagaaggcgagattcgccgcgtgggttcggtgcaatcgcagaaggtcgatgttcgactgatcgctgctacccaccgagacttgaagagcctggccaagatcggccagttccgtgaggacttgtattaccgcctgcacgtgatcgccctcaaattgccggccctgcgtgagcgtggcgccgacgtcaatgagatcgccaacgcgttcctgcagcgccagagcgcgcgcatcaaccgaaccgacctgaagttcgctccggacgccgagcaagcgattcgccactactcgtggccaggtaacgtgcgggagctggaaaatgcggtcgagcgagcggtgatcctgtcggagagcccggagatttccgccgagctgctgggcatcgacattgagctgagcgatctggaagacgatgacttcatcggcctggccccccaacagggcggcggtagcaacaccagccatgagccgacggaagatctgtcattggaagactacttccagcacttcgtccttgagcatcaggaccacatgaccgagaccgaactggcgcgcaagctgggcgtgagccgtaaatgcctgtgggaacgtcgccagcgcctgggcattccacggcgtaagaccggcgtgaccagcgagagttgagggggcgccctcacaggtaacacccgcagatgtgaaaaaactgttaccgcggatatttcgcgtaacaaaagccggggcttacggtaacgaagccccggctttttttggtccgtcaaaaacccgaaaccacctcaacccccaggttttgctgggcggtgcaaaagttggcacgcaccctgctatatgcttagtacaaaaacaataacaagctttgtacaagacaataaaaataagacgaatcgactcacgcataacaaaaacaacacggcggaggcgcagctaactgattcttttggagaggcgttgcatttggggcttgccccgcaaccaggccgagaacaacaaaaactgccctaaggcagagcctgaactggttggatcgtagatcagcaacacagcgaccaaagcaatccgtttgctcttgactcccgattgggagtgtcatgaaggtgaagcttcatggcgagggcgatcaacaaaaacaagaagcccgcaacccataataaaaatagagcacgcaactacttctgggggagcttcggctccccttgtagtttccgcgatttgaccgtccagcaacctcttgaagcttttggcttggggcttgcagcttgttcctacaccatcccctgactaaatgctagaatccccgcccatcatgcggtcattcttcgttatggccgaacattccttcaaacagtgcatcccatgctgaagaagttgttccagtcattccgttctcccttgcgtcgtacgcaacacaaacgcagcacgcctgaagtgctcaacagcagccagcattcgctgcaacgcgctcaattcagccgttatgcggtgaatatcgtcgaacgtttgcagaacgccggctaccaggcttatctggtgggcggttgtgtacgcgacatgctgctcaatatcacgcccaaggacttcgacgtcgccaccagcgccacgcctgagcaggtgcgtgccgaattccgcaatgcgcggatcatcggtcggcgtttcaagctggtgcatatccacttcggtcgcgaaatcatcgaagttgcaacgttccgcgccggccacccgcaaaacgatgaagaggaagacaccaaccagtcctcacgtaacgaaagcgggcgcatcctgcgcgacaacgtctatggcaccctggaagaagacgcgcagcgccgcgacttcaccatcaatgccttgtattacgacccggtcagcgagcgcattctcgactacgccaatggcgtacacgatattcgcaacaacctgatccgcctgatcggcgacccggtccagcgctaccaggaagacccggtgcgcatgctgcgagcagtgcgttttgccgccaagctcaacttcggcattgagcgccacaccgccgcgccgattcgcgaactggcaccgatgctgcgcgaaattccctcggcccgcctgttcgaagaagtgttgaagctgttcctctcgggctatgccgccgacaccttcgaaatgctcgtcgacctgcagttgttcgacccgctgttcccggccagcgccgaggcgttggaatacaacccgacgtacacccacaccttgatcagcgaagcgctgatcaataccgacctgcgcatcaagcagaacaaaccggtaaccccggcgttcctgtttgccgcgctgttgtggccggcgttgccaaaacgcgtactgcgcttgcaggagcgtgggatgccgccgatcccggccatgcaggaagccgcccatgagctgattgccgagcagtgccagcgcatcgccattccaaaacgcttcaccatgccgatccgtgagatctgggacatgcaggaacgcctgccacgccgcagcggcaaacgtgccgatctgttgctggacaacccgcgtttccgtgccggctacgacttcctgctgttgcgtgaaagcgccggcgagcagaccgacggcctgggcgaatggtggaccgactaccaggacgccaatgacagcgaacgccgcgacatgatccgtgacctcggcagcaaaggcgatggtgaaggcaccgggccgaaaaaacgtcgccgcagcagcagcaagcgcaagcgtagcgcggccgacgccccgggcgaataaacgtggagcgcatctacattggcatgggcagcaacctggctgccccggatcagcaattgcgcagcgctatcgaagcgctggcgcaattgcccgacacccacgtcgccggggtctctgccttctatcaaagtgactcactgctccctgggcagccgcgctacaccaatgcggtggcagccctggacagcaatcttgcgccgcttgatttgctggatgcgctgcaagccatcgagaacgaccagggccgcgaacgccttgagcgttggggcccacgcacgctcgacctggacatcctgctgtttggcgatcgactgatcgatgagccgcgcctcaaggtgccgcactaccagatgcacctcagggcgtttgtgctgtacccgttggccgaactggcgcccgccagcctggccttacccgatggtcaaaccctccacgacctgcttgaagcctgcccgtttgtcggtcttgaacgcctcaccgttgctgaatcgcgtcagtaacagcggtaacaccgtcatcgtaacaatgcggtaacacatccaattgacttcccgtgtcctcctcacgactataggcgtcccgctgccgccaacccggcgctgaagggcgcaatccaggccttataagcactgctctcaagacagtgcgcctgtataaacgaagactcacgcgcgttactcgctgtttccaagcgcctgaacgaggacccttttcatgccagacattaccctgaccaccttgcagagcctcaagctcaaaggtgaaaaaatcaccatgctgacctgctacgacgccacgttcgcccacgccagttgccaggccggggttgaagtgctgctggtgggcgactccctgggcatggttcttcaagggaatgacagcaccctgcccgtcaccaccgatgaacttgcgtaccacactgccagcgtcaagcgcggtaacgatggcgccttcatcatcgctgacctaccgttcatgggttacgcgacactcgaacagacctttcagaatgccggcaaactgatgcaagccggtgcgcacatgatcaaagtcgaaggcgcggtgtggcttgccgagtcgatccgcctgctcgcggagcgtggcgtgccggtgtgtgcgcacatgggcctgacgccgcagtcggtgaacatcctcggcggctacaaggtacagggccgcaatgaggcccaggcgcgccagatgcgcgcggacgccatcgcgctggaacaggccggcgcggccatgatcctgctcgaatgtgtgccgagcgagttggcggcagaaatcacccaggccgtgaaagtgccggtgatcggtatcggcgcgggttcggccaccgatggccaggtgctggtggtgcacgacatgctcggtctgtcgatcagcggccgcgtgccgaagttcgtgaagaacttcatggccggccagaccagcatccatgacgccttgagcgcttacgtcgccgaagtcaaaggcgtgaccttcccggccgccgaacatgggttctctgcatgaacaccgttaaaaccgtacgtgaactgcgggctgccgtgacgcatgcccgcagcgccggcaagcgcatcggctttgtgcccaccatgggcaacctgcacagcggtcatgccaccctggtgaccaaggccgcccagcaagcggatttcgtggtcgccagcatcttcgtcaacccactgcaatttggcgccggcgaagacttggacaaatacccgcgcaccctggccgccgatcaggaaaagctgctgcaggccggatgcaatctgttgttcgcacctaccgtcgaggaaatgtaccccggcggcatgaccggccagacccgtgtcagcgtgccgcaactgtccgaaggcctgtgcggcgccagccgtcccgggcatttcgaaggcgtggcgacggtggtcagcaagctgttcaacatggtgcagccggacatggcggtgtttggccagaaggactatcagcaactggccgtgatccgcgccatggtgcatgacctgaacatgccgatccagatcatcggcgagcccaccgtgcgcgccgacgacggcctcgcgttgtcgtcgcgcaacggctacctcaccgaagagcaacgcgccatcgcgccggtgctgtaccgcagcctcagccagatcggcgctgcgatcaagaccggtgaccatgacttcgccaagctgcgcgccgaacaggtccgccagatcgaagccgccgggttgcgtctggactacctcgaagtgcgccagggcgtgcatttgcgcccggcaacggcagaagatcgggatatcgtgatccttgtggcagcctacctgggggccacgcgcctcatcgataacctgcatctgaccctcgcctgaccgccctcaacgtgccctgcttgttgtgtaaatagaaagtgccggtataaaaaagtaccggcatgagcgcagacaaagccaagacatatcgacacgctaggtttaatgtaatcgccctgcgctatggttagcgctgtctggaacccattgctcgatcaaagactggatgttccaggcaaataagtgtcctaaaggcagtccccgtaataaaaggaaacccgcagcgatggcgtactaccgcacccctcatgacgttaccgctctgcccgcctggcaagcgctcaatcaacatcgccaagccatgcaggatttcagcatgcgcgaagcgttcaatgccgatcctcagcgtttttcccagttcaccctgagcagctgcggacttttcctcgattactcgaaaaacctgatcaccagcgaaacccgtgacctgctggtaaacctcgccaaagaggttcacctcaaggacgcgatcgacgcgctgtacaaaggcgagccggtcaattcttccgaaggccgcccggcgctgcacaccgccctgcgccgcccggtgggtgacaagctgtcggtcaacggcgtgaatatcatgccggacgtgcacaaggtgctgaaccagatcaccgacctggtcggccgcatccatgacggcctatggcgtggctacaccgagaagccgatcaccgacgtggtgaacatcggtatcggtggctcgttcctcggcccggagctggtctccgaggcgctgttgtcctacgcccataaaggcgtgcgctgccattacctggcgaacatcgacggcagcgagttccacgagctgaccatgaagctgcgcgctgaaaccacgctgttcatcgtctcgtcgaaatccttcaacaccctggaaaccctgaaaaacgcccaggccgcccgcgcctggtacctggcccagggtggctcggaagccgagctgtaccgccacttcatcgccgtgtcgagcaacaatgcggcggccgtggccttcggtatccgcgaagaaaacatcttcccgatgtgggattgggtcggcggtcgttactcgctgtggtcggccatcgggctgcccatcgccctggccatcggcatgtccaacttcaaggaactgctgtccggcgcctacaccatggaccagcatttccagaacgccccgttcgaacagaacatgccggtgctgctcggcctgctgggcgtgtggtacggcaacttctggggcgcgcagagccacgcgatcctgccgtacgaccactacctgcgtaacatcaccaaacacttgcaacagctggacatggaatccaacggcaagagcgtgcgccaggacggtacgcccgtcgccactgataccggcccggtgatctggggtggcgtgggttgcaacggccagcacgcttaccaccagttgctgcaccaggggacccaactgatcccggccgacttcatcgtgccgatcgtcagcttcaacccggtgtccgaccaccaccaatggctgtacgccaactgcctgtcccaaagccaggcactgatgctcggcaagacccgcaccgaagcggaagccgagctgcgcgacaaaggcatcccggaagacgaagtgcagaagctggcaccgcacaaggtgatcccgggcaaccgtccgagcaacaccctcgtggttgaacgcatcagcccgcgtcgcctgggcgccctggtggccatgtacgagcacaaagtgttcgtacagagcgtgatctggggtatcaacgccttcgaccaatggggtgtggaactgggcaaggagctgggcaagggcgtctacaaccgcctgaccggcgccgaagaaacctcggccgaggacgcttcgacccagggcctgatcaactacttccgcggtcgtcaccgcggctgatccaggtattgcaaggccaacgtccgtttggacgttggccttgaaccctccccctgctgggtgcatctttatgacttgtggctaaaacaagaataaggatcgctcatgttcgatatcagcacgttccccaccgccgatgccgtccgccgggctgcgcaactcagtcaagaggactatcagcgcctctaccgccaatccatcgatcagccggacaccttctgggctgaacaggccaaacgctttctcgactggataaccccctggcacactgttcaacgctcagacatccacaccggcgccgcccaatggtttgccggtggccagttgaacgtcagctacaactgcatcgaccgtcacctggcgcaacgcgccgatcagccggccttcatctgggaaggcgatgatccgacaaaatcttccaaaatcacctaccgccagttgcaccagaacgtcggccgcctggccaatgtgctgaaaagccgtggggtgaagaaaggcgaccgcgtgtgcatctacatgccgatgatcccggaggccgcctacgccatgctcgcttgcacgcggattggcgcggtgcactccgtggtatttggtggtttctcgccggatgccctgcgcgaccgtattctcgacgccgactgccgcacggtaatcaccgctgacgaaggcgtgcgcggcggcaagcccgttgcactgaagcagaatgtcgacaaggccctggccagttgcccgaatgtgggtacggtactggtagtggaacgcaccggagcgaccgttaactggagcgaaggccgcgacctcaagtatcaacaagccctggacgccgccagcgacgactgcccgcccgagccgatggacgccgaagacccgctgttcatcctctacacctccggcagcaccggcaaacccaagggcgtgctgcacaccaccggcggctacctgctgcaagcggcgatgaccttcaagtacgtgctcgattaccgcgacggcgaagtgttctggtgcaccgccgatgtgggctgggtcaccggccacagttacatcgtgtacggcccgctggccaatggcgcgacctcgctaatgttcgaaggcgtgccgagctacccggacagttcgcgcttctggcaggtgatcgacaagcaccaggtcaacatcttctacaccgcgcccaccgccctgcgcgcgctgatgcgcgaaggccatggcccgctggaaaatacctcccgcgccagcctgcgcctgctgggcagtgtcggcgaaccgatcaacccggaggcctgggactggtacttcaatgccgtgggcgaacaacgctgcccgattgtcgatacctggtggcagaccgagaccggcggcatcatgctcagcccactggtcagcgcccagcgcatcaagcctgggtgcgcgacccagcctatgtttggcgtacagccggtactgctcgatgaacaaggcaaggaattcagcggcgccggcagtggcgtgctggtgatcaaagccagctggccggggcagatccgcagtgtgtacggcgatccgcagcgcatggtcgacacctatttcaaaccctaccccggctactatttcaccggtgacggcgcccgccgcgatgaagacggcgactactggatcaccgggcgcatcgacgatgtgatcaacgtgtccggccatcgcatcggcactgccgaggtggaaagcgcgctggtgctgcacgaccaggtggccgaggccgccgtggtgggctacccccatgatgtcaaaggccagggcatctatgcctttgtcacccccatgaatggcgtggaacccagcgatgcgttaaaaaaacacctgctggacctggtcagcaaagaaattggcagcttcgccaagccggaactgatccaatgggctccggccttgccgaaaacccgttccggcaagatcatgcgcaggattttgcgcaagattgcctgcaacgagctggacagcctgggtgacacttcgaccctggccgatccgagcgtagtggacggcttgatcgacaagcgcctgaaccgataggaaccccttgagtcgccatggaatttatccgcagccgtatcgaaacccagctgatgagcctgaccggcctgtcgctgggccaactggacctggaaaaccccaagggcgacccaggcctgttcgggcccgactcggtgagttggcaagtacatggcgacttcagcagcatgctcatcggcggcatcagcgccttgatgctgcaagccttgcacccgctggccctggccggggtgtgggaccactcgaactttcgccaggacatgcttgggcgcttgcggcggacctcgcagttcatttcgggtacgacattcggctcgcgcaaagacgccgaatggctgatcgaaaaagtccgcaccattcacctgcaggtggtcggccacgcgccggatggtcgcccctatgcggccagcgacccggagctgctgacctgggtgcatgtggcggaagtcagtaacttcctggccgcccacttgcgttaccgcaacccgcacctgtccggtcgcgaccaggaccgttactacagtgaaattgccttggtcgctgaacggctgggtgcacggcatgttccgcgctctcggcaggaagtttcggattatctgacacgcatccgcccgcaattgctgtgcgacgatcgcagccgcgaagtgctgcgattactgctgaatgccccctcacccagcctgctggccaagccatttggcagcttgatgatgcgcgcggggatcgacctgctgccggattgggccagcgccatgctcgaccagcaccagagcccgctgcaacgccagatgatccgtgccggcgtcaagcgcagtgcgccgatgctgcgctgggcgatgcgcaatggttcggtgcaacgcgcccatcgccggatggggttgatgtaggtgacggcgcatagctgttaaacttcgcgccctcaatttcccagcaaggcgcgctccatgtcttccctgaatcaggcgctgcgcgccgccctcgatcatcgccaagacctgatcagcgaactgcatgcccaggccaccgactgttaccggctgttccatggcagccaggaaggcgccggcggcctgaccatcgaccgctacggtccccaattgctggtgcagagtttccaccaatccctggaaaccgccgacctgctggacctgcatcaacaggtcaaccagtacatgggcctggagttgttgctggtgtacaacgatcgcgcccgtggcaattcgcgcattgaccgcgaagacacggtgtatcgcgccgaacccgccgcactggaggacctggttggccacgagtggggcctcagttaccgcgtacgtgggcggcatgccgggcaggacccgctgctgttcctcgacctgcgtaacacccggggctgggtcaaggcccacagcgccggcaaaagcgtgctcaacctgttcgcctacacctgcggcgtgggcctgagcgcagccgccggtggcgcccgtgaggtgtgcaacctggacttcgccgagggcaacctggcggtgggtcgcgaaaacggtttgctgaacccgcaattgccgagcatggagttcgtacagtccgactacttcccggcgattcgtcaattggcgggtctgccgatcacccagcgtcgtgggcaaaagctgccgagttatccgcgcctggagcaacgtcaatacgacctggtgttgctggatccaccggcctgggccaagagcgcgttcggcaccgtcgacctgctgcgcgactaccagagcctgctcaagcctgcactactggcgaccgccgacaatggcgtgctgatctgctgcaacaacctggcgaaagtcagcatggaggattggcgcgaacaggtactgcgttgtgcagaaaaagccgggcgtccggtgcgtgactggcaaatcatgacgcctggagcggacttcccgtcccaggatcagcaaccgcccctgaaaaccctgatacttcagctgtaagaggtttctcaaaggcccttgctcttcggaaccgaaaacccgtgccatactccaaggcactcctgtttgacatagatggcgccgccccatgcccaaaggattgattcgcgccgctggcgccttgttgactgcccttgccctgtacagcttgctgggctttttgattctccccggcatcgcccttcgcatcgccaaccagcagttggccaattacgccacggtgccggcgcggatcgagcgaatcgagctcaacccgttcagcctggagttgaccctgtggggcctgaagatcggcgaacccggcaaggagcaagtcgggttcgaacgcctctacgccaacctgcagatcgacagcctctggacccgtgccctgcacctggccgacgtacagctggacaagcccaagaccgaattgctcttcgacaagtccggccaactcaacctggcgcagttgttcaagctgccgcccagcgagccaacaccggccaatcccgatgccaaaccgttccctttgcgtatcgacagcatcaagctggccggtggttatgtgcacttcgaggacttgcgccccagcgagcccatcgaattcctctacgacacactcgacttcgagctgaagaacctcagcacactgcctgaagacaatgccgacatgaccctggtcgcagctggcccggcaggtggacagatcgactggaaaggcaatttcagcctggtgccgatcacctccgaaggtacgttgaaagtcaccaacggcaagatgaaagcctggtggccctatgtacgtgacgcactgccactggtgcttgaagacggcgtgctcaacttcagcaccgagtacaaattcagcctggccaaagagaccgagctgaacctgaccaacaccgccgccagcatcgcgccctttgccatcaaggcaccggacggccgcccattggtacgcctggaacgcctggacgtcagcgagaccacggtggacctggccaagcagcacgtggtggtcggcaagatccgcagcaacaaactggaaacctgggcggcccttgaggccgacgggcaactggactggcagaaactgttcgccagccagccgagcaaaccggccaaggcgccggaaccgaaaaacgcacccgccaccgccgactcgccaaaagccgaacctgccgcgcccagcaaaccctggcaagtgctgctcaaggacgtgcaactgcgtaactatcaggtgcacctggctgaccgccaggccaagccggcggtagcgctggaactcggcccgctgaacgtcgacctgcagaatttcgacagcctcaaccagagcccgtttaccttgaaggtcgactccggcgtgggcaagcaaggcaagctccaggcgaccggcgaggtcaacctcaacccggtcagtgccaagcttaaagtgaacacccaggacatcgacctgcgggtggcccagtcctacatcagcccgttcatccgcctggaactgcgcagcggcatgctcggcagcaatctggatgtgaacctgaaaagcactgatcctctgaagcttcaggtcaccggccgtgcgcaggtcgaccaattgcacaccctggacaccctcaaaacccgcgacttcctcaaatggcagcggctggtgctcgaaggcgtgaactaccagcacggcgacagcctgtcgatcgacaaggtcaacctgctgcagccgtatgcgcgcttcatgatcaacgatgaccgcaccaccaacgttgatgacctgctgattccgcaagcgcccgacaaaggtcccaagcccgccagcaaggacaagcccttgggcattcgcatcgggcagattgcgatcaatgacggctcggccaattttgccgacttcagcctcacacccaacttcgccaccgcgattcaacagctcaacgggcagatcggcaccatcgacagccgccaggccaaaccggccagcgtcgacatcaagggcaaggttgatcgctatgcaccggtgaccatcaagggcagcgtgaacccgttcgacccgatggcggcgctggacattgcgaccagcttcaaacgtgtcgaactgaccaccctgacgccttattccggcaagttcgccggcttccgtatccgcaagggccgcctgaacctcgacctgcactacgtcatcaccaagggccagttgaaggccgagaacaaagtggtggttgagcaactgcaactgggcgagaaagtcgacagcgccgacgccgtggacttgccgattcgcctggccgtcgctttgctcaaggacagtgacggcaagatctccatcgaactgccggtcaccggtgacttgaacaacccgcaattcagtgtgatgccgatcgtctggcagaccctgcgtaacctggtagtgcgcgcggcaacggcgcccttcaagtttatcggtgggctggtgacgggcggcggctcggaagacctcggcaatgtgtcgttcgccccaggctcaagcgaattgaacaaggatgcggaaggcgccctgaacacgttggctaaagcacttaaggaacgccctaccctgcgcctggaaatcgaaggcacagcggcggccagcagcgatgggccattcctcgctgcccagcgactggagcgtgaataccagtacaactactacaagattcttcagcgtcgtggcgacaaagtacccgcccaggcctcgttgcttgtcgtacccgagaaggaaaaagcgccgttgctggaaggcatctaccgcacccgcctgaaagaacaaccgccggccgagtggaaggacctgagcagcgatgaccgcagcgcgaagctgcgcgacggcgtgatcaagttctggagtggcagtgacgtgctgctacgccaacttggccaggaccgtgccagcaccatcaaggactacctggtggataagggccagctggaagatgatcgggtgtacttcatcgatgccaacctgggccaggctgagaaagatggtcgggtggtcacgccaatgcatctggatgccgagtaacgtctgagcagcactatccaaatgtgggagtgggcttgctcgctcccacatttaatcttcatctgcccttcacagatattccgacccacaatagaacaggccccgacacaagtgccggggcctgtaatgaccacatccgtgtggtcggtcgcatgaactccagaggtgcatttgggtggatatctaactcaccctaagccgccgccgtccagttcagacgaaaacggtgcgttttactctgctttcaggccatcggccgatacagctttaacgcctttgattttcttggtgatgttcaccgcggtagttttctgagcttcagtaaccggagcggtcgaagacagggacactacgcctttgttggtttcgactttaatgtcggtaccaggaatgcctttctcggtaaccaggtcagcttttactttggtggtgatccaagtgtccgaggtggactctttggcaccagccgctgcgcttttggttttgtcgatgttgtcagccttggtagcgccgccagccatcaggccgtcagcagaaacagcagttacacctttgattttcttggtgatggctacagcagtggctttttgcgaatcggagatcgcaacggtcgaggacagggaaaccacgcctttgttggtttctaccttgatgtccgaaccaggaatgcctttttcggtcagcaggtcagctttgactttggtggtgatccaagtgtccgaagtggtttctttagccttggtgacttcaccggcggccaaggtcattggagcttgggaagtctgggcaaaggccacgttagcacccatggccagggtcagagcggtagcagtagcgagagcgaacttcttcatacgagtaactcctgttttattgaaagtctgcagtgtgtgaaccttgatgctgcagcgttaacagggttattgcaggcagtgtgccaagtctgcataagcaattaaatcctttacaaacaatgacttataaaaaacatgaaaattcggattcgtgcaacttgcatgatgccgtctgagcctgcatgcaagttgcggcttttgctttgtattaagcgcctgatttttaggtattttcctgctcccataaaaaaaggactccgaagagtcctcttttcagcgtgaagcctgggggtgattaaacgcccgaagccttggctgctgctacgtccttgatggacagcttgatacggccgcggttgtccacgtccagtaccagcacttccacttcctggccttccttcagaatgtcggtgactttctcaacgcgagcgtcgctcagcatggagatgtgcaccagaccgtctttgcccggcaggatgttgacgaatgcgccgaagtcgacgatgcgctcaaccttaccgacgtagatcttgccgatctctgcctcggcagtgatgcccaggacgcgctgacgtgctgcttcagccgcttccttggtttcgccgaagatcttgatcgagccgtcgtcttcgatgtcgatcgaagccttggtctcttcgcagatcgcacggatggtcgcgccgcctttaccgataacatcacggattttgtcggtgtcgattttcatcgcgatcatggtcggagcattttccgacagttcggtacgggactgaccaatgatctggttcatctgaccgaggatgttcaggcgcgcttccagggcttggcccagggcgatttccatgatctcttcggtgatgcccttgatcttgatgtccatctgcagcgcggtcacacctttggcggtaccggctaccttgaagtccatgtcacccaggtggtcttcgtcgcccaggatgtcggtcaggatggcgaacttctcgccttctttaaccagacccatggcgataccggcaaccggcgccttcatcggtacaccagcatccatcagtgccagggacgcaccgcaaacggaagccatggagctggaaccgttggattcggtgatttccgatacgacgcggatggtgtacgggaacacgtcagcggcaggcagcatggcctggaccgaacggcgggccagacggccgtgaccgatttcgcgacgaccagcgccacccatgcgaccacactcgcccaccgagaacggagggaagttgtagtgcagcatgaacgggtcttttttctcgccttccagggtgtccagcagttgtgcgtcacgggcggtacccagggtcgcaacgaccagagcctgtgtttcaccacgggtgaacagagccgaaccgtgagtcttcggcagaacgccgacttcaatgttcagcggacgtacggtgcgagtgtcacgaccgtcgatacgtggcttgccgttaacgatgttttcgcgaacggtgcggtattcgatttcgccgaacgccgcttttacttcgctggaggaaggctgaccttcttcaccggacagcttggccacaacctggtccttcaactcgcccaggcgcgcgtaacggtcggccttgacggtgatggtgtaggcgtcggagatggcagcgccgaactcggagcggatagcgcccagcagttcagtggcttcagcctgtggagcccaggtccaggttggcttggcagcttcggcagccagttcggtgacagccttgatgacagcctggaactcgtcgtgggcgaacagtacagcgcccagcatctggtcttcggtcagctctttggcttccgattcaaccatcagtacggcttccgaggtaccggcaacgaccatgtccaggctcgatgctttcagttgctcgtaagtcgggttcagcaggtagccggtgctttcgtggaacgcaacgcgcgctgcgccgatcgggccatcgaaaggaataccggagatggccagggccgccgaggtaccgatcatcgcagcgatgtccggatcggttttcttgctggtggaaacgacggtgcagacaacctgcacttcgttcatgaagccttctgggaacagcggacggatcggacggtcgatcagtcgggaagtcagggtttctttctcggaaggacggccttcgcgcttgaagaaaccgccagggatcttaccggcagcgtaagttttttcctggtagtgaacggacagagggaagaagcctttgctcgggtcagcggtcttggcgccaacaacggtcaccagtacggtaacgtcgtcatcaacggtaaccagcactgcgccggaggcttgacgggcgatacggcctgtctcgagggtaacggtcgactgaccgaactggaattttttgataaccgggttcacggtgtcctaccttctttgtggctcttggggaacttgtcttcttgcgaaattcttgggcaatgccgggaatcggcccgacgctcgtccagggtaaaacgtgtatccagataaaacttgaggctgggagcctgccatggaccagcggaaatcccactggcacacggcagacaaccaacctctagcgcaatcgcttattagcgacgcagacccaggcgaccgatcagagtctgataacgacccagatccttgcctttcaggtagtccagcagcttacggcgctggtttaccatgcggatcagaccacgacgcgagtggtggtctttaccgttggccttgaagtgaccttgcagcttgttgatgttgtgggtcagcagtgcaacttgcacttctggcgaaccagtgtcaccaacagcttgctgatagtcagcaacgatttgtgctttttcttgaacgtcgagagccatgaggcaatcctttttttcaggaaaccacccaaagggcagtttcaacaggccagggacaaatccctgtatctaaaaatgagtagtgaccgtgcctgttaacagccaccctcgttcggtcattctgaccgaatcagtcgacgtggcgctatacgcccgtcttcgctcacttcaccgataccgataaagcgaccgttatgatcctgtactcgcaccatgccgaacttcggggcatccggggcacgtaccggctggccgttgagccagtagaacgcgctgtgctccgagaagtgcagcaatggccaatcgagcaaaccgctgtccgatggcatcaggaagcgatcaactgcttcattgccgccttcggcgtgtaccgcttccaactcttccaacgtgaccgtctgggccaggctgaaaggaccggcctgggtgcgtcgcagttctgcaacgtacgcgccgcaaccgagcttttcaccaatatcttccaccagggtacggatataggtgcctttgctgcagtccacggccaaccgggcggtgtcgccttcacaggcgagcaattccaagcgcgcaatagtaacagaacgcggttcgcgctccactacttcgcccgcacgtgccagcttgtaaaggggttgtccgtcacgcttgagcgccgagtacatcggcggtatctgactgatttccccacgaaaagcgggtaaagccgcttcaatatcagcacgaccaacggtcacgtcgcgaacctgcaaaacatcaccttcggcgtcggccgtggtggtggtcttgcccagttgcatcagggtttcataacccttgtcggaatcgagcaggtattgggagaacttggtggcctcgccaaagcacaacggcaacacgccggtggccaggggatcgaggctgccggtgtgcccggctttctcggcattgagcagccagcggaccttctgcaacgcggcattggaggtaaagccaatgggtttgtcgagcagaatgatgccgctgacgttgcgacggatacgtttgacctgagccaccgcttactccttggcgtcttcaggtgtggacgggtgctggctgtcttcagccacggcgcgctcgatcagggccgacaggtgtgcaccccgcacgacgctttcgtcgtagtggaagtgcagctggggcacgctgcgcagcttcatttcacgggccaactgcatgcgcaggaaacctgcagccgagttgagcaccttgatgctttgcgcgatttcttcgctgctgtcctgccccatcacggtgatgaagatcttggcgtgacccacgtcacggctcacttcaacggcggtgatggtgaccaggccaacgcgtgggtctttgacttcgcgacggatcagttgggccagctcgcgctgcatctgatcgccgatacgctgggtacggctgtattcttttgccatgtcttgttacctgttactgccacacggtgaaacccgtggggtctgaaagcggcaaacgcccggcctgacaaaagccagaccgggcgttgcgtttagagtccgtacgctgcgcggggcatttgcatgcccacgcgctgcgtggctcctgaagtgcgcgagttagaggctgcgagcaacctgaaccttctcgtagacttcgatcttgtcaccagccttgacgtcgttgtagctcttgacgccgataccgcattccatgccggcacgtacttcagaagcgtcatccttgaagcggcgcagggattccagctcgccttcgaagataacgatgtcttcacgcagtacacggattggacggttacggtacacggtgccttcaaccaccatgcagccggcgatcgcgccgaacttcggcgagcggaacacgtcacgtacttcggcgatacccaggatgttctcccggacgtcgctgccaagcatgccggtgagggctttcttgacgtcttcgatgatgtcgtagatgacgttgtagtaacgcatgtccaggccttcctgctcgacgatcttgcgagcgccggcatcggcacgcacgttgaagccgaacagtacagcgttggaagccagtgccaggttggcgtcggactcggtgataccaccgacaccgccaccgacaacgcgcacttgcacttcgtcgttacccaggccgttcaaggcgccgttcaacgcttcgagggaaccacgtacgtcagatttgaggacgatgttaagcgtcttcttctcttcctggcccatgttctcgaagatgttttccagcttgccggcgtgagcacgggccagcttgacttcacggaacttgccttgacggaacagagccacttcacgggctttcttctcgtcggctaccacgctcatctcgtcgccagcgtccggagtaccgtccaggccaaggatctcgaccgggatagcaggacctgcttccttgattggcttgccgttctcgtcgagcatggcacgtacacggccgtagttcgaaccgaccagcaccatgtcgccttggcgaagggtaccgtcttgaaccagaacggtcgcaaccgggccacggcccttgtcgagacgggattcaaccacaacaccacggccaggagccgatggcgtagcagtcagttccagaacttcggcttgcagcagaacggcttcgagcagttcgtcaacaccagtacccatcttcgcggagaccggtacgaatggagtgtcgccaccccactcttcggatgtcacgccgtgaaccgacagttcgctacggatgcgatcaagatcggcgcccggcttgtcgattttgttcacagcgactaccaacggaacgccagctgccttggcatgctgaacggcttcgatggtttgtggcatcacgccgtcgtccgctgcaaccaccaggatcacgatgtcggtcgccttggcaccacgggcacgcattgcggtaaacgcagcgtgaccaggggtgtcgaggaacgtcaccatgccacggtcagtttcaacgtggtaagcgccgatgtgctgggtgataccgccggcttcgcctgcggctaccttggcacgacggatatagtcgagcagggaagttttaccgtggtcaacgtggcccattacggtcacaaccggtgcacgggaaactgcctcaccttcaaacttcagggactcggccagggaatcttccagggcggtgtcgctgaccagggtcactttgtggcccaattcttcagcaacaagctgggcagtttcctgatccagtacctggttgatggtggccggagtgcccagcttgaacatgaacttgatgatttcagcagccttgaccgacatctgctgggccagatcgcccacagtgatggtctcgccgatcttcacttcacgcacgacagggccggttgggctctggaaaccgtgggcgttgcgtttcttcagcttggccttgccgcgaccaccacgacggaagccatcgctttcttcgtcggtagtgcgtggggcaacgcgtggcgcaggcgctttctctttgaccgaggcacgatgcggagcgtttttgcgctcgccatcgccaccaccaccgcgacgattgttatcgtcggcacgcggtttgtccggacgacgaggttcgtcgcgcttgcgagcgtcagcagccggtgctggtgcagcggcaaccggagcggcctcacgcacagcttcaactggcgcgctaggcgcagcgaccgcttcagtggcagcaggttgcgcagcagcaggctggcgacgcgcttcttcttcggcgcgacgcttggcttcttcttcagccttctgacgagcagcattttctactgcgcgacgttcttccagttcgcgtttgcgctcggcttcgatttcttccgggctgcgctgtacgaagactttcttcttgcgtacttcaacgctgatgctcttgctaccagcaacacgcagggtgctggtggttttgcgctgcaatgtaatcttgcgcggttcttccactttcgccttgtggctgctcttcaagtgagtcagcaaagactgcttctcactatcgctcacaccttcatcggcggcggtgtgcggcagacctgcctcacgcatctgctgcaacaggcgctctaccggtgttttgacctcatcggccagttgtttcaccgtgacttgcgtcatgcacttctctcctcaggccgcgcctagttactcgaaccaatgggctcgggcggccatgatcaacttgccggcacgatcatcgtcaatgccgtcgatgtcgagcagatcgtcaatagactgctcggccaggtcttcgcgggtaattacgccgcgcaccgccagttccatcgccaaatccttgtccataccctcaagcgagagcaggtcttcggccggatgggcgtctgccagcttttcctcagtagcgatggctttagtcaacaaacgatccttggcccgagcgcgaagctcgttgacggtgtcttcgtcaaagccgtcgatgttgagcatttcttccaacggtacgtaggcaatctcttccaggctggtgaagccttcatctaccagcacctgcgccaggtcttcatcgacttccaactcttcgatgaagttgcgcaggatgtcaccggtttcagcttgctgcttagcctggatgtccgattcggtcatcacgttcagggtccaaccggtcagttggctggccagacgcacgttctgaccaccacgaccaatggcctgagccagattgtctgcgccaacggcgatgtccattgcatgggcatcctcgtcaacgataattgccgccacttcagccggcgacatggcgttgatcacgaactgcgccgggttatcgtcccacaggacgatgtccacacgctcgccacccaactcgcccgacaccgcctggacgcgcgaaccgcgcataccaatgcaagcgccttgcgggtcgatgcgtttgtccttggagcggaccgcgatcttggcacgcgaacccgggtcgcgggacgcagccatgacttcgatcaggccttcggcgatttccggcacttcgatacggaacagctcgatcagcatttccggcgcggtacgcgacaggatcaactgtgggccgcggttctcggtgcggatttccttgagcagcgcacgcagacgcacgccaacacggaaggtttcgcgggaaatgatgtcttcgcgagccagcaacgcttcggcgttgttgcccaggtcgacgatcacgttatcgcgggtgacctttttcacggtgccggagatgatttcacccaggcgctcgcgataggcgtcaacgacttgagcgcgctcggcttcgcgaaccttctgcacgatgacctgtttggcggtctgtgcagcgatacggccgaattcgatcgattcgatcttttcttcgacgacatcaccgaccttggcaccaggatgcgtttcggcaaccttgcttggccaggtttcgatggccggatcatcaagatcggcttcttcgacgaccgtccagcgacggaaagtctcataggcaccggtgtggcggttgatttccacacgcagatcaacttcgtcttcaaaacgcttcttggtagcagtggccagggccagctccagcgcttcaaaaatcacgtttgccggtacgcccttttcattggataccgactcaacaaccagcagtacttctttgctcatcgtacgcctcgcctttcgcaagccattggatccgcgggatccgcgtctcagtcaaaactgggaataatgttggccttgtcgatcatatcgatcggcaacaggaactcatggtcttctacctgcaccacgacatcctgctcttctacaccgcgcagaaggccctgaaagttgcgtcgcccttcaaagggagagcgcagcttgatcttcacttgttcaccggcaaattttgcaaactgatcaatagtgaacagtgggcgttccatgcctggcgaggaaacttcgagggtgtattcaacggcgatcggatcttcaacatccagcacaccgctgatctgacggctgacaatggcacaatcgtccaccagcacgccgccctctttatcgatataaacgcgcaacattgagtggcgaccttgagccgaaaactcaataccccagcattcatagcctagggccacgaccaccggggccaacaaggcctgcaactcttctagcttgctcgacacctgaaccccctcgtgcatgtatgtgcatgctgtgcaaaataaaaaaatgggcgaaacgcccatccttgaaacgccgtcgaacagcggcgttgaaagtgtccagctaacaaaaagccccttaaaaggggctccgctaaaactggttgcgggggccggatttgaaccgacgaccttcgggttatgagcccgacgagctaccagactgctccaccccgcgacaaagctggggcggaagtatacgaccgatcccttaaagggtcaatgtaaccttccacctacaagaaagcccgcaacagcgggctctcctgataattggtaccgagaaggggactcgaacccctacaccctatgggcacaaccacctcaaggttgcgtgtctaccaattccaccacctcggcaatacagcgtttacaacccttcttacttctgctcttgagctggaggtacgtcagtcgctggaatagccgacttttgctcttgaagcaccgggacatcatcagaagccggttttgcttttggtacttccaacactgctggatttgggagacctacttgagtcagcacatgagctttctctttagcaaagtaacctaaccccaagctggttatgaagaaaccggcggcaagtatagcagtaaacttactaagaaaggtagaggaaccttggcttccgaacacagtatttgaagcacctgcaccgaaagacgcaccagcatccgcacctttaccctgttgcagcaaaaccagagcaactacgctcagagcagccaacagatgaaaaacgactacgactgtttccagcattttttcagtttcccgcggcgcgacaaatcgcaccgaactcatctgcattcagggaagctccaccaatgagccccccatcgatatccggcatgccgaacagttcgaccgcattggccgccttcacgctgccgccgtatagaagccgcacaccttgtgcgacttcagaattctctgccgccaactgcgcacggatggctgcgtgcacatcctgcgcctgttgcggtgtagcagtcagcccggtgccaatggcccagaccggctcgtaggcgattactgcctttgcaaacgcaccaacacccagctcctcgatgatgctgcccagctgacgcgagacaacttcaagagtcttgcccgattcgcgctgctccagggtctcccctatgcacaacaccggaatcaagccacaagcctgtgctgctgcgaacttgcgattgagcgtcccatcacgctcgcccatcatctgacggcgctcggagtgcccgacaagcacgtaggaacaacccgcatcgaccaactgactcggcgctatctcaccggtcaatgcaccttgcatggcttccaccgcagaattctgcgcgccgacctggatcgacttgcccttcaagccatcaaccacttgggtgatatgcaagcaaggcgggaaaaccgcgacatcaacaccgctcggcaaggccaagtgacgaaggccattgatcagctcagcgacactggcgcgggtaccgtgcatcttccagttaccagctaccatagtgcgacgcatgctgtacctcgtcggtcaaagtgggcgcagatgttacccaaccacatcatcactggcaagccgaattcaggcgcaaacttcagttaccagttttgccaggtcttcggcatggccgcgaacctgtgtttcatcgtcaccttcgaccatgacacgcaccaatggctctgtgccggacttgcgcaacagcacacggccacgccccgccattgccagggttacacgctcgcatgcctctttgacagccggatgctcaataggattttcaccgccagcaaaacgcacattcagcaatacttgcggacacttgcgcatagcttggcgcgcctgggccaggctctcttcacgacgcttcatggccataagcacctggagcgcagcaatgatcgcatcacctgtcgtggtgtgctggaagcagacaacgtgcccggaattctcgccacccacctgccagttgcgctcaagcagctcggcgatcacatagcggtcgccgacattggcacgcacgaacggaatacccagatccgccaaggccagttcaagccccaggttactcatcagcgtaccgacgacaccaccttgcagcttgttacgctcatgcatgtcgcgggcaatgatgaacaggaggtcatcaccatcaacaatggcgcctgtgtggtccaccatcagcacgcgatcaccgtcaccgtcgaaggcaatacccaggtcggcatgctcggcaaggacggccgcctgtaactgctccatgtgggtggagccacagttctcgttgatgttcaatccgttaggctgagccgacagcaccgtcacgtctgcgcccaactccttgaatacgctcggcgccaccttgtaggtcgcaccatgggcgcaatcgaccacaatcttcaggccggcaaaattggtgctgcttggcacgctgcttttgcagaactcaatgtatcggccggaggcgtcgttgatacgcgacactttgccaagcttgctggactcgaccaccgtcatcggcgcatccagaagctcttcgatcatcagctcgatctcgtccgggagcttggtgccctggcccgagaagaatttgatgccgttgtcatcatgagggttatgcgaggcactgattacgataccggcttcagcatgaaaggtacgcgtgaggtaagcgatcgccggcgtcggcatcggccccagcagcatcacatcggcacctgcggcagacagccccgcctccaacgccgactcgaacatataccccgaaatacgagtgtccttgcccactaggatgcggcacgcgcccatgctgcggaacgccatacctgcagcccaaccgagcttgagcatgaaatcaggagtaattgggaactcgccgacccgaccgcgaataccgtcggtaccaaaatattttttagtcataagtgctccatcattcttattcggctgattctaccgcggccatcatacgcaccacatccatcgtctcgacaacatcatgcacccgcaagatacgcgcccccttggtgactgcaagcgccgccagcgcaagaccgccgtacagccgctcgcccacaggacgattcagcgccagcccgatcatgctcttgcgtgaaacgccgaccagaagaggccgaccaagggcatgcaaggactccatatgtttgaacagacttagattgtgctgcagggtcttggcgaagccaaaaccgggatcgaggacgatcttttctgcagcaatcccggcagcagtgcattgcgcaacccgctcggcaagaaacccactcacctcaccaacaagatcatcgtagtgagggttgtcttgcatattgccgggctcacccagcatatgcatcaggcaaaccggcaaaccggtggccgcagccgcatcaagcgcaccgtcacgctgaagcgagcgcacatcgttgatcagccccgccccaaggcgcgccgtctcacgcatcacggccggcgtcgacgtatcaaccgagatgatcacatccagctcacgtgcaatgcgctcaacaattggcgcaaccctctccaactcttccaggggagaaacgatgcgagcgccaggccgcgtcgactccccccccacgtcaatcaacgtcgcgccagccgccaccatcgcctcggcatgacgtaacgccgcatcgagttgactgaagcgaccaccatcggaaaaggagtcgggggttacattgagaatgcccatgacgtgcgtatgggccaaatcaagaacccggttgccgcaaggcaaccgggtggaggacaacacagaagtcatttcaaaccttagacgtcagctgcgggaccgccaatcggggtttcagggcgttcgttctgaaccactggcggagtgccagaagtgcccgaaccaccttcccaatcgcgaggctcgcgcggcgtgcgaccggccatgatgtcgtcgatctggtcggcatcaatggtctcgtacttcatcagcgcatctgccatggcatccagcttgtcgcggttgtccgtgaggatctgcttggccgtgccgtagcactggtcaatgatgctgcgcacctcggagtcgatcagcttggctgtctcaccggagaagctggcgttttgaccaccaccgccacgccccaggaacacttcgccttcttcctcggcatacatcaatggaccgagtttttccgacaagccccacttggtcaccatgttccgcgcaatctggctggcacgcatgatgtcgttggaagcaccagtggtgacgccgtcgaagcccagggtcatctcttcagcaatccggccgccgtacagcgagcatatctggctgatcagtgcacgcttggagaggctgtaacgatcctcttccggcaggaacatcgtgacacccagcgcccgaccacgcgggatgatcgacaccttgtagaccgggtcgtgctcaggcacgacacgaccaacgatggcgtgaccagcttcgtgataagcggtgttctgcttctctttctcggacatgaccatggatttgcgctcggcgcccatcatgatcttgtctttggccaattcgaactctttcatctccacgatacgcttgccagtacgggcagcgaacaacgaggcctcgttgaccaggttagccaggtcggcaccggagaagcctggagtaccacgggcaatcacggccggagccacgtcgtcgcccatcggcactttgcgcatgtgcactttcaggatctgttcgcggccacggatatccggcaagcccaccacaacctgacggtcgaaacggcctggacgcagcagcgcagggtccagcacgtcaggacggttggtggcagcgatcacgatgatgccgtcgttcatttcaaagccatccatctcaaccagcaactggttaagggtctgctcacgctcgtcatgaccgccgcccataccggcgccacggtggcgaccgacggcgtcgatttcatcgatgaagatgatgcaaggcgcatgctttttagcctgttcgaacatatcgcgaacacgactggcaccaacaccgacgaacatctcgacaaagtcagaaccggaaatggtgaagaaaggcaccttggcttcaccggcaattgccttggccagcaaggttttaccggtacccggagggccaaccatcagcacaccgcgaggaatacggccacccaggcgctggaacttgcccggatcgcgcaggaactcgaccagctcgcccacttcttccttggcttcgtcgcaacccgcaacgtcagccagggtggttttcacctggtcttcagagagcaggcgagccttgctcttgccgaagctcatcgggccgcccttgcctcccgcaccgccttgcatctggcgcatgaagaacatgaacacggcgatgatcaccaggatcgggaagctggctaccagcaattgggtccagatgctctgctgctcaggctgcttgccttcgaccaccacgtgattatccaccaggtcgccgatcagaccgttgtcctggattgccggacgaatggtcttgaagctgtcgccatcgttgcgtttgccggtgatcacgtagccatcaaccgctacgcgctcgaccttgccatccttaacttgctggatgaagtcggaatagttgagggtctgcggctcgttagggctggagaagttgttcatcaccgtcaccaggacagccgcgatgatcaaccacaggatcagattctttgccatatcgttcaattaactaccctctgaagcaagctccgctactggcgcgcgcttcgcatgatattcaccggcctaacttactacattacctacaacactggcaggcgccgtctgtaaccctttgtgaaactttgactacacaatattcgtaaagcttcgtgacgaaagcgatataaaaaaacctatcgactcccttcaaaccttcaaagacgctcatcactggcggcgccttcgatgccacggaacccccgcgccaacagatactgctcgcgagaccggtcacgcgaggagtccggtttgcgcatctgtaccttgtcgaacagcttgcgaatgttcttgtggtactcgtcgaaaccttccccctggaagaccttgaccaggaaatcaccacccggacgcaatacccgacccgccagatccagtgccaattcgcacaggaacatggctcgcggcatatcaacagccggtaacccactcatattgggtgccatgtcggaaatcacaaggtccacctgcgaatttcctacagcttccaggatctcggccaggaccgcatcctgggtgaagtcaccatgcacgaaggtcacatccgggatgctgtccatctccaggatgtcagaagcgatcaatcggccttgcccaccaatcagacgactggccacctgggaccagccacccggggcagcgcccaggtcgatcacactcatgccggggcgaaacaatttgtccttgtcctggagctccagcagtttgtagctggcccgggaacggtagccgtccttttgcgcctttttgacgtaaggatcgttgaaatgttcttgtagccacttaaggctggttttggaacgggccacgggccacctcgaaaaataaaacgggtcgtgattaactgggcggtcccggactcgctcgggtaaactggccgccgctttttacaagatcagacgcaggggtcagattatgccgctcactcaagagcagaagaaacagtacaaatccattggccaccatctgaaaccagttctgattgtggcagataacggtttgactgaaggtgtgttagccgaattcgaacgtgcgctgaacgatcatgaactgatcaagatcaaggtcaacatccttgatcgcgaagcgcgcctggctgccattgcagaactgtgcaaggcaggcaaagcggacctggtccaggtcatcggcaagatggcgctgctgtatcgcaagaacttcagcgtcaacaaacaactgtcgaacgtacaccgcttcaaatagctttaaaattacaaaagggtcacgggcgtgcttcgcgcgccccgccactccatcccggcgcaggctgcaaaaccagcaccaggccggagaaccctagcacaagatagctgaatagctgccagcgcaacgcttccggcaaccagacatgcaccacgcaaaacattgcgcatgcatacagcgccatcaacagcagttgcccgcgaatatcccgccacaaactctccaaaccctcggccttgaccagcaccaatgcctggagcgtcacgcacgccgccgcaaatcccaccaacagcgcactgagcaatccatcgatctcattgatcagcagcggtgccaggcctatcaggccgagcgccggcagcacaccaatgtgcaacaaccaaaggccgcccacccaaagcatctgggagagctgccaaagcatggcgcccgcacgaagcgggcgccgtctttcagacgtgacgaacttcaacaatctcgtactcgattacgccacctggcgtctttacagccaccacatcaccctcttccttggcaatcaaggcacgggccagcggggaaccgacggagattttgccgagtttgaaatcagcttcatcctcaccaacgatgtggtagaccacgctttcgtcagtttcaacgttggcgatttccacggtggtgccgaagatcaccttgcccgtcttcggaatggtcgtcacgtcgatgaccaccgagttttgcaagcggccttcgatgtcacggatccgcgcctcgaccataccttgctgctcgcgggcagcgtggtattcggcgttttccttcaggtcacccagttcgcgggccgtaccgatgtcctggctcagcttcggacggacgaccttggtcagatgggcgtgctcctcttccagggccttgaagccctggacggtcattgggtatttggtcatgccttcaatcctgcgtgtagatcctgcaagcggcgcacggtcttttcaggaccgaacttgagcgcttcgcagatggcttcgccagcagcaatggtggtggtgcagtagatcttgtgctgcaaggcgttacgacgaatggagtaggagtccgcgatcgactggcgaccttcggtggtgttgatgatcagggtgacttcgtcgttcttgatcatgtcgaccacatgcggacggccttccgtcaccttgttcacgcgacgcactttcaggccggcagcttcgatcagcttggcggtcccggcggtggccacgacttcaaagcccaagttgatcagatcacgggctacgcctgcaaccagtggcttgtcgtcatcacgcacgctgatgaacgcagtaccgccggtcggcagcacttcgctggcgcccatctgggccttggcaaaggcttcaccgaaggtatcgcccacacccatgacttcaccggtggacttcatctctgggcccaggatcgggtccacgccagggaatttggcgaatgggaacaccgcctctttcacgctgtagaagttcggaatgatttccttggtgaagccgatttccttcagggtcttaccggccatcacgcgcgcagcgatcatggccagggagacgccgatgcacttggaaacaaatggcacggtacgcgaagcacgtgggttgacttcgatgacgtagatgtcttcgccttgcagcgccaactgtacgttcatcaggccaactacgcccagttccagggccattttcttgacctgttcgcgcatctcgtcttggatgtgcgctggcagcgagtacggtggcagcgagcaagccgagtcaccggagtgaacgcccgcctgttcgatgtgctgcatgatcgcgccaatcaccacgtcggtaccgtcgcacaccgcgtccacgtccatctcgatggcgcagttgaggaagtggtccagcagcaccgggctgtcattggacactttcaccgcatcgcgcaggtaacgcttgagttcttcttcttcgtagacgatttccatcgcacgaccgcccagcacgtaggacggacgcaccaccagcgggtagccgatcttgctggctgcgcggatggcttcgtcttcactgcgcacagtggcgtttggcggctgacgcaggttcaggcgctcaaccatttgctggaagcgctcgcggtcttctgcacggtcgatggcgtccgggctggtaccgatgatcggcacgccggcagcttccagggcacgcgccagcttcaggggggtttggccgccgtactggacgatcacgcctttgggcttctcgacgcgcacgatttccagcacgtcttccaaagtcactggttcgaagtacaggcgatcggaggtgtcgtagtcagtggaaacggtttccgggttgcagttgaccatgatggtctcgtagccatcttcgcgcagggcgagggcggcgtgaacgcagcagtagtcgaattcgataccctggccgatacggttcggaccgccacccaggatcatgatcttgtcgcgacccgacggcgcggcttcgcactcttcctcataggtggagtacaggtaggcggtgtcggtggagaactcggccgcgcaggtgtcaacgcgcttgtagaccgggaagatctccagcttgtggcgatgggtacgcaggttcttctcggtcacacccagcagcttggccagacgttgatcagagaaacctttgcgcttgaggcggaacatcatgtcgcggtcgatgctggccagacccagggtcttgaccttctcttcttccttgatcagatcttcgatctgcaccaggaaccacggatcgatcatgttcatgccgaagatatcttcgacggtcatgccggcgcggaaggcgtccgccacgtaccagatacgctcggcgcccggcacggtcagctcacgcttgagcacgctcatgctttccgggttgctcaggtcgagcttctcgtccaggccgcaaacgcccacttccaggccgcgcagggctttctgcagggattcctggaaggtacggccgatggccatgacctcaccgacagacttcatctgggtggtcaggcgcgcgtcagccttggcgaatttttcgaaggcaaaacgtggcagcttggtcacgacgtagtcgatggacggttcgaaggacgccggagtcttgccgccggtgatgtcgttcgacagctcgtccagggtgtaacccacggccagcttggccgcgaccttggcgatcgggaagccggtggctttcgacgccagggccgacgaacgggaaacacgcgggttcatctcgatcacgaccatgcggccggtgttcgggcagatgccgaactgaacgttggaaccaccggtttccacgccgatctcgcgcagtaccgccagggaggcgttacgcaggatctggtattccttgtcagtcagggtctgtgccggagcgacggtgatcgagtcaccggtgtgcacgcccatcgggtcaaagttttcgatggagcaaacgatgatgcagttgtccttcttatcgcggacaacctccatctcgtattctttccagccgatcagggattcgtcgatcagcagctctttggtcggcgacaagtccaggccacgggcgcagatttcttcgaactcttcgcggttgtaagcaataccgccaccggtgccgcccatggtgaaggacggacggatgatgcacgggaagcccagggtctcgaggaccgcattggcttcttccatgctgtgggcgataccggaacgcgggcaggccaggccgatggacttcatggccttgtcgaagcgcgaacggtcttcagccttgtcgatggtatcggcattggcaccgatcatctctacgccgaacttttccaggacgccttcgcgctccaggtccagggcgcagttcagtgcggtctggccacccatggtcggtagcagcgcgtccggacgctccttctcgatgatcttggcaacggtctgccacttgatcggctcgatgtaggtggcgtcggccatggccgggtcggtcatgatggtggccgggttggagttcaccaggatgacgcggtagccctcctcgcgcagggctttacaggcctgggcgccggagtagtcgaattcgcaggcctggccgatcacgatcgggccagcgccgagaatcaggatgctttttatgtctgtacgttttggcatgggtttgtcactcaaatccgcaggtcagtcggcaagccgtcttgaacaatctttgaagagcctgcgggggccaccgacattcggggccgcccgcaggccgctcagtcagcgtcgcttggccatctcattgatgaaacggtcgaacagcggcgctacgtcgttcgggcccgggctggcttcagggtggccctggaagctgaacgcgctcttgtcggtgcgctcgatgccctgcagggaaccgtcgaacagcgacttgtgaatggcgcgcacgttgctcggcagggtggcttcatctaccgcaaaaccgtggttctggctggtgatcatcacaacgccggtgtccaggtcttgtaccggatggttggcgccgtggtggccgtgccccattttcagggtcttggcgccggaggccagggccagcagctggtgaccgaggcagataccgaacaccggaatctcggtttccagcacttccttgatcgcctggatggcgtagtcgcatggctcagggtcacccgggccgttggacaggaacacgccgtccggttgcagggcgagcacgtcgctggccggggtttgcgccggcaccacggtcacgcggcaaccgcgctcgaccagcatgcgcaggatgttgtacttcacgccgtagtcataggccactacgtggtaaggcagatctgcggcttcgatagtcgcatggctgtcggtcttcaagtcccagaccgtggagcgccattcgtacttctctttgacgctgacgactttcgccaggtccatgcccttcaggccagggaagccctgggctgcggcaatcgccgcctcctcggaaatattgtcaccgaccatgatgcagccgttctgcgagcctttctcacgcaggatgcgcgtgaggcggcgtgtatcgataccggcgatcgccaccacgttgttggctttcaggtaatcggacagcgacatcgtgttacgccagttgctcgcaaccagtggcaggtcacgaatcaccagacccgccgaccagacacgatcagactcgacgtcttccggtgtagtaccggtattgccgatgtgcggataggtcagggtaacgatctgttgggcgtaggaaggatcggtaaggatttcctgatagccggtcatggcagtgttaaacactacctctccaacggtctgaccgtcggctccaatggcttcgccgcgaaaaatgctgccatcagcaagggcgagtatggctggcttagtcaagaagacctcccgtaaataaagcctgaaagggcgatcgcaggttgtaaaaaagcggagtgacgtatggacacgtcaccccgcttcttcaccgaattattctgcgcgcttttagtggacacactaaagctgtagcttacagaaaaaggcttttttggtccaccgctaatgagccttaaaggcaggggaatgcgacaggacgtcgcttagcgggtaaaaacggggcctaagcataagcttgaggccccgttttagctactgattagtgcagatccagcacatcgcgcatgtcgtaaaggcccgcctcgcgcccctccaaccagagcgcagcacgcaccgcgcccttggcaaacgtcatgcgactggacgccttgtgcgtgatttccaggcgctcgccctcagcggcgaacaacacggtgtggtcacccaccacatcacccccacgcacagttgcaaagccgatggtgtcgcgcgcgcgcgcaccggtgtggccttcacggccatacaccgccactttcgacaagtcgcgacccaacgcatcggcaatcgcttcgcccatgcgcagagcagtacctgacggcgcatcgatcttgtggcggtgatgggtctcgatgatttcgatatccgcttcatccccgagcacacgggcggccaaatcaagcagcttgagcgacaggtttacacccacactgaagttggccgcgaagacgataggaatatccttgcccgcctccaccaacagctgcttctgctcaagcgtcaaaccggtggtgccgatcaccatcgccttgcccgccttgcggcagaacgccaggtttttcagcatcacgtccggcagggtaaagtcgatcagcacgtcgaactcgtcagctacctgctccaggttacccgacaacgaaacgccgatgcgccccagtgaagccaactcaccggcatctgcaccgatcaacgtgctgcccggacgaacgatcgccgcggtcagcccggaggccggcgagcgttgctgtaccgcctcgaccagtgtcttgcccatgcgcccggcagcgcccattacggctatacgtcgcatactcaattccttacaggtcgccgaagaagcgcttcacgccttcgaaaaagccagaactttgcggcgattgagagctgttaccgtccaacgaactgcggaactcttcaagcagctcacgctgacgacgatccagattgaccggagtctctaccgccacacggcacatcaggtcaccagcaccgccgccacgcaccggcgcaacgcccttgccgcggatacggaactgcttgccggtctgcgtgccctcagggatcttgagcttgacccgaccgtcgagagttggaatctcaagctcgccacccagcgccgcatcaacgaagctgatcggcacttcgcagaacaagtgcttaccgtcacgctggaagatcgagtgctcgcgcacattgatcaccacgtacaagtcgcccgtagggccaccctgagtacccgcctcgccttcgcccgacagacgaatacggtcaccggtatccacacccgccggcactttcaccgaaagggttttgtactcttcgacacgaccttcgccatggcacgagtcgcacgggtcggaaatgatcttgccctgaccatgacaacgtggacaggtctgctgcaccgagaagaagccctgctgcatacggacctggccaataccgccgcacgtcgggcaggtgatcggcgaagaacctttcttggcccccgaaccgtcgcacggcttgcagttgaccagcgtcggcacacggatattcacgctggtgccgcgcacggcttcttccaggttcaactccagggtgtagcgcaagtcgctgccacgctgggcgccgccacgctgaccaccccggccaccgccgaagaagtcactgaatacgtcaccgaagatatcggagaagttctgaccaccaaaaccggcaccgccgccacccatgctcgggtcgacgccggcatggccatactggtcgtacgccgcacgcttgttgggatcagacagacattcgtaggcctcattggcctctttgaacatttcttcggattctttgctatccggattacggtccgggtgatgcttcatcgccaggcgacggtaggccttcttcaggtccgcctcgctggagccgcgctccacacccaatacttcgtaatagtcacgctttgccataagtctttgcactcttaaggacgttcagccagaccctcctgagccttgccaaactcgttgagccccaatacaggcccggacccaactcacgtcaattcaacgatcctggtcattactacttttagccaggtacccggccaaaaatgcggtatttactgctcggaaagcaggagcattcccgatcacaccgccagcatccgaacactgtcgcatgctgtaaaaattcgcataccccagacacgccaacgcgggagcaagctcccgcgcggcgacatcctaccagtcaccgcttgatagcggtcaaccgggcgaccaacttacttctggtctttgacttcttcgaactcggcgtcgacaacgtcgtcgtgcttggcttcaggctctgcgtgctgcgcagcaccgtcagccggctggccttgttcggcgtacattttctgagccactggcgcagagactttcgacagctcttcgatcttggcttcgatagccgccttgtcgtcgccttttacagcggcttccagggcaactacagcagcttcgatggcagccttctcttcagcagtcactttatcgccagcatcagcgaccattttgcgtgtcgagtgaaccagtgcgtcaccctggttacgggcgccagccagctcggcaaacttggcatccgcatcagcgttggcctcagcatcacggatcatctgttgaatttcttcatcagacagaccggagttggccttgatggtgatcttctgctctttgccggtggccttgtctttcgcgcctacgtgcaggatgccgttggcatcgatgtcgaaggtcacttcgatttgtggcacgccacgtggtgctggtggaatctcggccaggtcgaacttgcccagggacttgttctgagccgcttgcttacgctcaccttgcagcacgtgaatggtcaccgcgccttggttgtcgtcggcagtcgagaacacctgggatttcttggtaggaatcgtggtgtttttctcgatcagcgccgtcatcacgccgcccatggtttcgatacccagagtcagcgggctgacgtccagcagcagcacgtctttgacgtcgccggccaataccgcaccctggatggcagcacccatggcaactgcttcgtccgggttcacgtctttacgcgcttctttaccgaagaactcggtaactttctgttgaaccagtggcatacgggtctgaccgcctaccagaatcacgtcgttgatggagccaacgtcgataccagcgtctttcaaagcgatgcggcaaggttcgatggtgcgctgaaccaggtcttcaaccagtgcttccaacttggcgcgagagatcttcacgttcaagtgcttaggaccggtggcgtctgcagtgatgtacggcaggttaacgtcggtcgacatgctcgaggacagttcgatcttggccttctcggcagcttctttcagacgctgcatggccagcgggtcacccttgaggttcatgccgctttctttcttgaattcgtcaacgaggtagtcgatcagacggatgtcaaagtcttcaccacccaggaaggtgtcgccgttggtagccaacacttcaaactggtgctcgccgtcaacttcagcgatctcgatgaccgacacgtcgaaggtaccgccacccaggtcataaacgatcacggtgtggtcgcctttggccttgtccataccgtaagccagagcggctgcggttggctcgttgatgatacgttttacgtccaggcccgcaatacggccggcgtctttggtcgcctggcgctggctgtcgttgaagtaggccggaacggtgatcaccgcttcggtcactgtttcgccgagatagtcttcggcagtcttcttcatctttttcaagacttcagccgagatctgcggcgcagacatcttgttgccatttacttcaacccaggcgtcaccgttgtcagccttggcgattttgtaaggcaccatcttgatgtctttctgtacgacttcttcgtcgaacttacgaccgatcagacgctttaccgcgtaaagggtgttgtgcgggttggtgacagcctgacgcttggccgactgaccaaccaagatctcgccatcatttgcgtaagcgatgatcgacggcgtggtacgtgcgccttcggcgttttcgataactttggctttgccgttttccatgacggagacgcaggagttggtggtccccaggtcgataccgataattttgcccatgatttactctcccgaaacttgaatttggttgccgcagcagtggtggctaactgcggtagcacttaaacgcttgacttatagatgggggctttacagcgtatttcaagcctgctcatcaatagaaggcgaaaccggtgcaggcgccttgctcaccacgaccatcgccgggcgcagcaggcgaccgttgagctgataccccttctggaacactttcagcacgctgttaggctccaggtcatggctttcctgcatggccatggcttggtgatgctcagcgttgaacggttcgccgccggttggatcgatggcttccagctgataacgcttcagggtgtcctggaacattttcagggtcagctcgatcccttcgcgcatcgggcggatgttttcatcgtccgggttggacaactcgagaccacgctccaggctgtcgatgatcggcagcaagtcactggcgaatttttccagcgcgaacttgtgagccttttctacatcctgctcggcacggcggcggacgttctgcagatcggcggcaacacgcaaagattgatcctgcgcagcagccaattgctcttcgagcacttgcacacgcgttgccagctcatcgccgacagccgaattggcgtctggagtttgcgtatcctgcgtctgttcgtcagccatagttttctcctttcaaaatcatgcacgaactcaactcgcgcttctgttccggtatatggggccacaatttccaggttcaagagcgcaggcgttaccaaaagtctttcccatgatcgggatcaattcctgccgccccattccgcattgcgctaaaaaacacgctcattcaagcaaatcgagctaagcgccaggattgtcagccctgaacaaaacactgtataaataaccagacctaaagcctgggagcgcccgtcatgctcgtgcacctgtccgtacataattacgccatcgttgaacatctggatctcgaactggatcgcgggatgagcgtaatcacaggcgaaaccggcgccggcaagtcgatcatgctcgatgccctgggcctcaccctgggtgatcgcgccgacagcggcgtggtgcgccccggcgcagacaaggccgatatcctggccaccttcgacctggccgatattcccgaggccgaaacctggttgaccgaacgcgaccttaataatgaaggcccgtgcattctgcgccgggttatcacggcggaaggtcgctctcgcggctatatcaacggcacgccctgcccactgggcgacttgaaagccctgggcgagttgcttatcgatatccacagccagcatgagcaccagtcgctgctgaaaaccgacacccatcgccgcctgctcgatgaatatgccggcgccacagaccttgcccgccaggtgcaacttgccgcccagcgctggcgccagacgcggcaggaactggagcgactctccaactccggcgatgaacaacgcgctcgtcatcagttgctcagttatcaactcgaagaactggaaagcctgggcctaggcgagactgaactggagcagcttgagcaggaacacaagaacctcaccaacgctgaaaccttgctgggcatttgtcgccaggtggtagagcaatgcagtgaaagcgactcaggcaacgtgctcaatgcactgactgccagcctcaatcgcttgtcgagcgtgaacaatgcctccggctcgctgagcgaagctacgacactgctcaccagtgcacagattcaggtggaggaagcggtcggtgaattgaatcgctttctggaccacttcgatgccgatcctgcacgcctgcaggaaatagaagagcgcctggacaccatctataccctggcgcgcaagcatcgaatccagcctaccgaagtggcaacgatgcagcaaaagctgctggatgaaatcgagaccctgaatgcgaatgacgaatccatcgaacgactgggcgaagaactcgcctcgttcgctcgtcattaccaggagaaagcgcgcgaactgagcgacctgcgccaacaagccgcgaccggcctggccagcgcagtggaacttgagatccaacgcctgggcatgccgggcgggcgcttcaccattgaactgcgcgccaacgccagcaacgagctgcaaccccacggcctggaacaggtggaactgctggtcagcgccaaccctgggcagccactcaaggcgttggcaaaagtggcatccggcggcgagctttcgcggatcagcctggcgatccaggtgattaccgcgcaaacctcccgggtgccgacgctggtgttcgacgaagttgacgtgggcattggcgggccgacagcagaaattgttggccaactgttgcgacgcctgggggatagaggtcaggtactgacggtcactcacttgccgcaagtggcagcccaagggcatcaacacttgtttgtgcacaaggtacgcggcagtgatgcaacgcacacagccgtatccaagttgaacaagtcggaacgcgtggaagaagtggcgcgcatgctcggcggtattgatttgaccaaggagtcgttggcgcacgcgaagaaaatggtcgtggcggcaaaggcctgagcgaaaaatttccttcttatagaaagcacgaaggcgaccctgaggtcgccttcgatcgttttgcagcgtaaatctgcagcgcttgttactttttcttacggatgtaaaggaccagattatggtcaaccagatcgaagccatgctcttcagcaatcttatgctgcagcgcttcaatctcggggctggtgaactcgataacctcattggtatccaggtcaaccatgtggtcgtgatgaccaccgtcagccaattcgaacactgcatgaccgccgtcgaaattatgacgaaccaccagccctgcggcttcaaactgggtcagcacacggtaaaccgtggccaggccaacgtcctcgttagactccatcagtgccttgtagacatcctcggcactcatgtggcgctgctcagcagaatcgagcatttgtagaatcttgactcgtggcagagtcactttgagaccggctttgcgtagttcgctattttcaaccatggttagctttctcgcggatgctgcttcgcagcttctcttaatacgggtatgatcggcgtttacgttgtcccagccaagatagtggaagtcgcccaccgatgcaaaacaccaagctcttgctaaccagtttcacctttgtgggactgctcgcactcgccggttgttcattccccggggtttacaaaatcgacatccagcagggcaatgtcgtcacgcaggacatgatagaccagttacggcccggaatgacccgacggcaagtacggtttatcatgggcaaccccctgctgaccgacactttccatgccgatcgctgggattatctctacagcctgcagccaggtggcggtgaacgccagcaggagcgcgtcagtgtcatcttcaatggcaatgaccagcttgtcagcctgtccggcgacttcatgcccggcgtaagccgtgatgaagccctgcttggcaaggataacggcaacaacgtgacttcgcctgcgcaggaagctgagaagcccaagtccgaagtaccagccaagcccggctccttgctcgacaagatccagaaagacgtcgacggcgtggaaacagtgcccgtcccgacgcctcagcctctggacaccagcccgcagtaagtttgcggcgctcaacaaaaagcccggcatgccgggctttttgctgtctgccatttgactggcctatgaactctgctgcttagccaaggccgccttggccgcgcgaagccggcgcacttctttcgggtccgccagcaacggccggtaaatctcaatacggtcaccgtcctgcactgggcgcacatcagcatccgtaaccaccctgccgaatatccccaaaggacaatccgccaaatccagctcgggaaattgcactgcaatacccgacgcctgcaccgcagcacgcagctgggtgcccgccggcaccgtcaccgccagcaacacctggcgatcctcggctgcatacaccacttcgatctcaaccatgcagttgcttggcccgctgacaaaatgcatccaccagggtattggccgcctggttgaacaacgggcccagcgtcgcccgcacaataggcccggcgtaatcaaaagaaagatccaggctgattttgcaggccttatccgtcagcgccttgaacacccatacgccatgcagctgggtaaacggcccttcctgcaaattcatttcgatggacttaccgggcaccagcacattacgcgtaacaaaatgctgactaaggccgcccttcgcgacccccacactggcgaccatgtgctcatcactgctttccagcacctcggccgttgagcaccacggcaggaattccgggtaacgcgccacgtcgttgaccaggtcatagagcgcctgtgccggatagggcaacagcgccgaacgttgaatatgcgtcgtcatgtgtgcgttatttccacagctgaggcaaacatcgcgaaaaaacagcccgatccgcgaaagaaaaaatccagagaactgcccgcattgtccgggattcgtccaacacgctcaagcacgcaggttgaccgtagccgacacgctcgcaactccctataatgccgcccctatggctaaacaaaagaaacaccccacagggaccatcgcgcaaaacaaaaaggcgcgacacgattacttcatcgaacatcggttcgaggctggtctggtcctggccggctgggaagtaaagagtctgcgtgccagcaagctgcaactggtcgacagttatgtgctgctcaaggatggcgaggcgtggctgctcggcagtcatatcaccccgctgaccaccgcgagcacccacgtgatcgccgacccggtgcgtacgcgcaagttgctgctcaatgcccgcgaactggaaaagctcgcagccgctgtacagcagaagggttatgcctgcgtctgtctgtcctggtattggagcaagcacctggtcaagtgcgaaatcgcactgggcaagggcaagaaggaatacgacaagcgtgattccgagcgcgaacgtgattccaaccgcgaactgcatcgcgccgtgcgcaacaagggcaaggaagaataatccttgctgcgatgcagccgtgggcgcccaccctcggctacatccccttgcgccgctccgcacgcgccacgcgctgaacttcctgacgcacttcctccagcacttcctgcacatacagcaggtgacgtgttgaaacctcgcgcgcctgctcggcgcgaccttcgataatcgccaggtacaaatcccgatgctgactgatcagcatgtcgcgggtttccgtacgctgttggtacatgccaccaatgttggtcaccacgttacgtttgagcaggtcgaacagaccgcgaatggtgtgcagcaacacggcattatggctggcttcggcgatcgccaagtgaaaccgcgcatcggccgcgccctcctcggcccgactcacctcatcggaccgggtatagcaatcctgtagtgcttcgaaggccgccgtaagtcgctcgcgatcaacctccgtggcgcgcagcgcggcgtaataggcgcaagaggcttcaagggtctggcgaaactccagcagatcacgctgggcctcgggattgttctccagcagatgcagcagcggatcactgaacgtggagcccagggactcagccacataattgcccccgccttggcgactgaccagcaaacctttggccgccaacttctggatcgcctcgcgcaaggaaggccgcgacaccccgaactgctcagccaaagcgcgctcggccggcaaacgctcgcccgacttcagcgtgccctcaaggatcatgccctcaagctgctcgacaatatcgtcagacaaacggcgctgacgcacctgatcaaaccccatcactcactctccaccatcccgaccactcgccagggcctctattctggcctatcgcggcgcttgcggcacctatcagaacgccttcctttcaaccgatcagaacaccctgcacagcgacctacgaccaaagtttcgcaggcggcaaattgacacgcccccagcaaggcttttactctagccaacagcgattgtaaattggtattaccaattacccaagctaaccaaacaacaacaatcaggggccaccccatatgcaaacctggcaacagctctacagcccgctcggcagcctcggcctgtccgcattggcggccgtcattccgatcgtattcttcttcctcgcccttgccgtgtttcgcctcaaaggccacgtagccggcagcatcaccctggcgctgtcgatcctggtggcgatcttcgccttccagatgccggtggacatggcgctggccgctgccggttacggctttgcttacggcctatggcctatcgcgtggatcatcgtcgccgcggtgttcctctacaaactcacggtcaaaagcggccagttcgagatcatccgcagttcggtcctgtcgattaccgacgaccaacgcctgcaagtgctgctgatcggcttctgcttcggtgccttcctggaaggtgcggccggtttcggcgcccccgtggcgatcaccgccgcgttgttggtcggcctgggcttcaacccgctgtacgccgccggcctgtgcctgatcgcaaacaccgctcccgtggcctttggcgccttgggcatcccgatcatcgtggccgggcaagtcactggcatcgacgcgttcaagatcggcgccatgaccggccgccaattgccgctgctgtcgctgttcgtgccgttctggctggtgttcatgatggacggcctgcgcggcgtacgtgaaacctggccggccgcgctggtcgcaggcttgagctttgccatcacccagtacttcacctccaacttcatcggcccggaactgccggacatcacctcggccctggccagcctgatttccctgaccctgtttctgaaagtctggcagcccaagcgcactgcgggcgcacagattgccggcgccacttccagcgctgcggtcactgcgagcgcaggcggtttcggcctgccgcgcaacacgattgtctcgccctacagcctggtgcagattttcaaggcctggtcgccgttcctgattctcaccgtactggtcaccatttggaccctcaagccgttcaaagcaatgttcgccgccggtggctcgatgtacagctgggtgttcaacttcgcgatcccgcacctggatcaaatggtgatcaaggtcgccccgatcgtgaccaaccccaccgctatcccggccgtgttcaagcttgacccgatttccgcgaccggtaccgcgattttcttctccgcgctgatctcgatgctggtacttaaaatcgacatcaagactggtcttaccactttaaaagagaccttctacgaactgcgctggccgatcctttccatcggcatggtgctggccttcgccttcgtcaccaactactccggcatgtcttcgaccatggcgctggtactggccggcaccggtgcggccttcccgttcttctcacctttcctcggctggctgggggttttcctgacaggttccgacacatcgtccaacgccctgttcagctcgctgcaagccaccactgcgcatcagatcggggtgaacgacaccctgctggttgccgcgaataccagcggcggcgtcaccggcaaaatgatctcgcctcaatctatcgccgtggcctgcgccgcaaccggcctggtaggcaaggaatccgacctgttccgcttcaccctcaagcacagcctgttcttcgccaccatcgtcgggctgatcaccctggcccaggcctactggttcaccggtatgctggtgcactgagacctgcacgctatagggtaagaatcgacgccggacaacggttccggcgtcagctatttctggaggaccgatgagcctgcctgctgctttcctgcgcgacgtcgcacaactgatcccgaaagatcggcgcttcgacgacccgctttccaccctcgccttcggcaccgacgccagtttttaccgactgatcccacagctggtaatccgtgtggagtcggaagacgaagtcgtcgcgctgctgcaactggctcagcgcgaccatgttccagtgaccttccgcgccgccggcaccagcctgtccgggcaagccatcagcaactcggtgctgatcgtgctgggggacaattggaacggccgcgagatccgtgggcagggggcacaaatccgcctgcagcccggcgtgatcggcgcccaggccaacgcgtggctggcgccgttcgggcgcaagatcgggccagacccggcatcgatcaacgcctgcaagatcggcggtatcgtcgccaacaacgccagcggcatgtgctgcggcacggcgcagaacacctaccacaccctggccgggatacgcctggtattggcggacggcagccgcctggataccgaagacgcggccagcgtggcagcgtttcgcgaacagcacagcgcgctcctggaacgcttggcgacactcggtcgcgagacccgggcaaacgctgaactggcggcaaagatccgccacaaataccgtctgaaaaataccactgggctgtcactcaatgccttggtggatttcgatgagccgctggatatcctcagccatctgctggtgggctccgagggcacccttgggtttatcagcgcggtcacctacgacactgtgatcgatcaccccaacaaagcgtcggcgttgattgtgttccccgacgtcgaaacctgctgcaatgcagtaactgtcctcaagacccaacccgtttcggccgtcgagctactggaccgtcgcagcatgcgctcggtacagaacaagccgggcatgcccgctttcgtacagcacctatcggaaaatgcctgcgcccttttgatcgagtcgcgtgcagcttcctcgtcgttactgcacgagcaactggcgctgatcatggcctccctggccccgtttccggtggagaagcaagtcgacttcaccgaagaccctgtggaaaacgcccgcctatgggcgatccgcaaggacaccttccctgccgtcggcgccgtgcgcaaaaccggcaccacggtgatcatcgaggacgtgaccttcccggttgaacaactggcaatcggcgtgaatcgcttgatcgagttgttcgacaaacaccactacgacgaagcgatacttttcggacacgcgctggaaggcaatctgcacttcgtgttcacccaaggcttcaacagcgcggaagaagtcgcacgctaccaagcgttcatggacgacgtggcacaactggtggccgtggagttcggcggttcgttgaaagccgaacacggcaccggccgcaatatggcaccgtttgtcgagctggaatggggcagcgacgcctatcaactgatgtggcaactcaagcgcctgctcgaccccaacggcattctcaacccggacgtggtgctcagcgaagacccgcaaatccacctcaagcacctcaagccactgcccgccgccgacgagcttgtggataagtgcatcgaatgcggcttctgcgaaccggtgtgcccgtcgaaaggcctgacgttgagcccgcgccaacgcatcgttatctggcgcgatatccaagcgaagaaacgcgccggtatcgacacctctgagctggaagccgtctatcagtaccacggcatcgacacctgcgccgcgaccgggctttgcgcccagcgctgccctgtgggaatcaataccggcgacctggtgaaaaaactgcgcagccgtgacgccgaccgcacgaaaaccgccgaatggctcgccacgcatttcgccaccgcgctgcaaggcgcgcgttttaccctgcatgtggccaatggagcgcgcatgctgctgggcgcgccgcgcctggcaaagctatcggccagcgtgaccaagctgtccaaggggcagattccgcagtggaccaacgccatgccgcagccggaaaaagccattcgcttcagcccggcggtgacggacgagcggccacgggtggtctacctggcggcctgcgtctcacgcgccatgggcccggcggcgggcgataaagagcagatgtcgctgtacgacaaaacccgcaagctgttggaaaaggccggataccaagtcgtgtttcccgacaaccaggacaacctctgctgcggccagccgttcgcctccaaaggttacgccgaacaggccgagcacaagcgccaggaactgatcggcgcactgctccacgccagtcgtggcggactcgacccgatctactgcgacaccagcccctgcaccctgcgcctggtgcaggacctgggcgaaacgcgcctggatctttacgaccctgtgcgatttatccgcacccacctgatggatcgcctcgacttcacgccccaggaagcgccgatcgccgtgcacgtcacctgcagcacccaacacctgggcgagagccaggccctgatcgacctcgctcgccgctgctccaacaccgtggtgatcccggaaggcattcattgctgcggatttgccggcgacaagggcttcaccacgccggaactcaactcccactcactgcgcagcctcaaggatgcggtgcaacattgcagtgaaggcatctccaccagccgcacctgcgagatcggcctgagccagcatggcggcatcgattatcacgggttggtctacctggtggaccgcgtcacccaggcccgcgctcactgatcctgcaaaaaaaacagaacccctgcgcgccggcgtagtcatctgcataggcctcgccaagcgaggtttatcagtgatgtcgctggcagcggttgaacgccagcagcgtcgagcccttttgcgcaaggagatacccgatgaagcgttccgctcttgctggcttgttcattaccgctgcgatgctggcttcccctgtattcgcggcgggcgagcccgatctgtgcaaaatcaatctggacaaaatcaacaacggtaaagccctgctcgccaccgacaccagcggtaaaagcggcgagatagacactgccgtctcccaggccaaggcggcccacgccgcgggtgatgacaaaaaatgcatcgagatcacctcgaaggcgctgcaagacctgcagaacagcgaaaaaggcggccaataggttgctcagtcacggaaggccaaccttcgggttggccttccgtgagcgtttggcgtacactgcataggcttgtcactcactaagaaacaacgagttacaagcacggggccgtttaggattcgacgccggtcgcgaaactttaggtgcatgccgagttggtaacagaactcgtaaatccactgttgcaacttcttatagttgccaatgacgaaaactacggccaggaattcgctctcgctgcgtaagcagccttagccctgagcttctggtaccttcgggtccagcaatcaccaggggatgtctgtaaacccaaagtgattgtcatatagaacagaatcgccgtgcagtacgttgtggacgaagcggctaaaacttacacaactcgcccaaagcaccctgcccttcgggtcgctgagggttaacttaatagaaacggctacgcatgtagtaccgacagcggagtactggcggacgggggttcaaatccccccggctccaccatttgatcatctaaagacgtccacggacgtctttttttgcgcctgaaatccagtaaatactgggctttcagcgccatcagcgtccacggacgtccaagagcagccacgctgtatggcattccaaatggcattccaagcccaacagtgctaatttttggaatgccaaccccatcctggaatgccaatgtgcgcacaagctactcgcctctctgagctcaaaatcaaatctgctaagccctctgagaaggactacgtcctgtttgacggcggcggacttcaaatgcgagtgagaagtaatggctctaagctatggaacttcaactatcgacaccccgtgacgaagaagcggatcaacatgggcctaggtactttccctgaagtttcgttagcgcaggcacgaaaggggtctattgcagcgagggaaatacttgcccaaggcctcgaccccaaagaacaacgagatgccgtgctgcaagcaaagcaagctgaaactgagcatacattccagaatgtcgcgacgtcctggtatgaactgaagaaggatgcggtgacaccagcttatgccgaggacatctggcgttcgttgacgctgcacgtttttccagacttggccaccacacagatttcagccatcagcgcaccacaagtcatcaaccttcttcgaccactcgaaaccaaaggtagccttgaaaccgttaaacggctgtcacagcgactcaacgagatcatgacttacggggtcaactcaggattgatacacgcaaacccactcagcgggattcgctccgtcttcaagaagccgagaaagaaaaacatggcggcacttgctccagatgagctgaaagagctcatggtggcaattgccaatgccagcataaaaagaactacgcgctgtctgatcgaatggcagctcaataccatgactcgaccagcggaggctgcaaccacgcgctgggccgacatcgacttcgagaagaggatctggacgattcctgctgagcgcatgaagaaacgccgcatacatatcgtgccgctcacagatcaatcactggcactgttggaggcaatcaaaccatacagcgggcaccgagagtatgtatttcctgcagaccgagaccctcgaacacactgcaacagccagaccgccaacatggcgctaaagcgcatgggcttcgaaggtcgattggtgagccacggcatgcgctcaatggccagcactattcttaacgaacacggctgggatcctgaattgatcgaggttgcgcttgcccacgtagataaagacgaggtccgcagcgcctataaccgagccgactatatagagcgcagacgtccaatgatggcctggtggagcgagcacattcaagaagccgctaccggaaatctttcggtagcggctatcaaacagtgtacggacaaaaaagtcattccaatacgttaagcagatagaaaacataggcgagcgtcaccaaaccgaggcggctgaaccgctctcagctcctctgtaaacgtaaaggcattgatggctcactggcccgagttttgtacagatgtcaattgatgcgaattagccagattggtgcaagtttatgcaaaaaccaaaatatcaaaactaatctttataaataataggcataaatgaatttctacatctcatcacactccaacccactggccaagcaagaccaaagctatgcctactatgaccaaaatgagtaagttatccgtgagagaaccagagatccaaaaagccttgcttcaagtacttattcaagaagagaatccagatgcgctagcgattgagtttccgtttgacttcggccgtagaagggctgatgcaatatgcattgccaacaaccagctttctggctacgaaataaaatcaatattcgacagggtagatagactgcccgaccagatcgagtcgtataaaaagctatttgattttgtatatgtagtatgcgacaaacaccactatagaaaaataaacaaacttataagcagaaatacaggaatatacatatttaatgatggaattatcactaaaaaacgctcagcaaagaacattcgaaacactgacataatgacaaccctagatgcaattccaatgcaacaattgaggactgacttcaagctaaacgccaactccaaactagagctttgcaaaaaaataaaagattcccactctcgcgaattaataagagaaaaaataaaaaattacataaccaataaatacgccccgcaaactacgacattccggagcgaggcaagccaagtattaacattagacgacatattgtcgctaaccctaaacccgcagaaactaacgccctaatacctccactctccgataaatataattattcacccttacggatatccaaaatgaaggactaataccagaagggctaccagccgaagcacttcgtatttcctcatcaccccacgtaaaaccattagaaaacctcacatcagcaacaactttcttcgcacacttaacatatgaacccttatcccttctataacgataatagtaaaataccccatcatcacagaaatcaatccttggaacaaaagtgccgcctcgcatttccgtctgatttatatttacagatgcataatccccaaacttaacaagatcatcctgctcattcagagcgagaaataggccatgctcgtaaatatcaaaactcccctcttcatccccaccaccctctttagaaacaaactgtggaaatgagcctgcaataacaactacactctctaaccaatcggtatcttcgccgatatcaagaactatatttttagccgactcaaagagctctacgactgtttctagagaatcctcttttacagcggccctaatacaaccctcatcaagcaaaacgtaaagctttgcttcgccaagctcatctagaattggctcaatcacttcagagtattcatcttcctcaagggaggccggtagacgtaaagccaaccgagggaatgcaaccgacataatactgacaaacttgagtgcgtttacgagcccaggatcctcatcgaaatcgatatgtatggtcggtacaatatttaactccgcgtaggatgtgagcatgtccctccaattcttatatccaccatcaggaacaagaacactttctatctgagagttcatctgcttaggatctgttgacacatcaagaataaatggcctctttccttgaatgagtgcaatctgatcaagccttttagacacatcaccgactggattatttttggatgttcttgactttgtaagctcatagacgggaagtatcttatctaacaccaaatcatccacgcatgatatagctctaagctcagcatcttttgtctttaacactggaaaataaacaaagctactccaatccatgccccttcatccctagcattttggctctaactcttacagcaagagttgaaactttaaaatgttttccaagctcttcaatactgccatcgaaaagcttgacgtattttctgaacacctcttccggcatcagaagctccccagcaaacctgttagcttccgactccattggactgctgtcaccattgcggaagaagttttgatctacaaactcagcttgcccacctctatgtcgcgaaaaatgtccaagctcgtgtgcgattgtaaatctttgtctattcggatgatgcagcgcattaactttcatcacccaatccttcccattaggcgcgcgacgcaactctccagacacttcatcattcataggtacgcaaaggaactgtattcctaagacacggacgagcgcatgcacatcaagcggcacagcttccacgccgttacgctttgctatttctagcaattgcgcaacggtcaaaagctcagccccgtcatttgtacgaggcgcgctaacggtttgagcggtttttggccttgaatttttacggacaaaagccatattctcgcctactcagtaatttttccatcttcatcagcatcatctgttctatccaacatagctacacgctggctaatagtcattatagcaccatcgattgtttttagcctgcttgaaacgccttctatctgatcaaataaatcgccataagtagagttaattttcgagatctctttcttggcctttcttttcaccagatctgtaaactcaccacttcttgaaaattgctcaaactgttctacagcctctttaattgcttctgctttcgaagaagctctaataataaaaaacgctattgcaaggattgctgcatttaaagcaattaaaacactaacaatagtttgataaaaagaaacctgcattgaccaaagagcatcaactgttatcaacgtcttttctttaaccatccttgaaatcaatatctgctcataataatcaaggtctttaatttcacgcagagggacatactgcccatgagtcaacaaaatttttgttagcggagaaaagtgaataatcgccaatgcaaaaacgagactaagcgcagtagaaaaaagagttgcaacaataaacccttttatgtcatggcgacccatatttactattatccttatataaacggcttacagagaggttcctattcaccctcggccagacgcaaaactactcgccatcctcatgctacaccgccttccaaccagaagtctcgaccaattatgccgctcgcgagtcacctaaatgtcagttgactgatggatatgaggctaccaagaaaaggttttggacctatcggtaggaaacgctcacgcgccctcccctccgctctctgaaacggctagttccattgaagaaaatttcagtcctacataacagcgatgacaccactaccacgaaggttcgccctatgtcattgcagtgccctcgctgtcactccccaaaagtcgcttcattccatcacgccatgaaaatcggcgcgaccatcggcaccgttggcggtgctgcgcgtggcatcagtactgcgctggctggcgttcaggctggtgcgtttattggcgctattgctggacctgtcggtatcacacttggctccgtatcgggtgccatcctcggtggcctcgccggcggggttggtggttgtgcgctcggcgcccaactcggtgagtcgctcgatcgccacgtcctggcccacaatctctgcctgctatgtggtcaccgctttaacctaccgacctaatccggtcaatctctcttctatctattacgtccgtttcggtgctgcgttgtacgcggcgctttatgacggatagcatccaaaggaatcacaaccatggctcatctcgtcgaaactatggcctacgccggagcaactccttggcacggccttggcaatcacctcactcaaaagcaacccatcgaagtttggcaacgcgaagccggcatggactgggcgatccaggaaagccccgtcctcttcaaatcagagaccatcggccacctgggcgcgatccattccttccccgaacagaaggtgctgttccgctcggataccaaggcgccgctgtcagtcgtttcccagcgctaccacaccgtgcagcctcgagaagtcttggagttttatcgtgacctcaccgaggtctccggctacgagctggaaacggccggtgtactcaagggtggtcgcaagttctgggcgctggcgcgcaccggacaaagctctaccctgaagggtaacgaccaggtcaacggctacctgctgctggccacgtcctgcgacggcaccctggccaccacggcaacacccaccaccgtacgtgtggtatgcaacaacaccctgacgatagccctggacggctcatctcgcgcaatcaaggtgccgcacaacacgcgtttcgatccaaagacggtgaagaagcagctcggcattgccgtctcgcaatgggacgattttatgtaccgcatgcgtgcgctggccgaacgcaaagtgcagtggcatgaagcgctgggcttcttcatgagcgtgctgtgcgagaccaatccgaccggcgtactgccggaggtactgcccaacgaacgcgccctgcgaaaggttcaggagctgtacgaaggtcgcggccgaggcagtcagctggactcggctcgcggtaccgcctggggcctgcttaacgccgtaaccgagtacgtcgaccacgaacgtcgcgcccgtagcaacgagtaccgcatggactcggcatggtttggccaaggagcgcagatcaagcaacgtgctctggacaccgccctgcaacttgtcgtctaaccggttacttcctcccctccccaaaacgcccgatcagcctcgttgctgatcgggcgtttctatttctgcaaggtgaacgctatgaacgctactccgttgcgcagcactagcaaggctcgtccagcgctgcgcctgatcagcaccaaggaactgcctcgtgaagattggctggcggtgcgcaagcaaggcatcggcagctcggatgccggcgctgcggtgggtctaaatccctacaaatcgcagttggagctgtggctggagaaaaccggtcgagacaccacactgccaaaagccgacccacatgatgaagaaagtccgatgtactggggcaacgtgctggaaccaatcgtggcctggcactacagcaagcgtactaaaaacaaggtgagacggatcaacgccgtactgcagcatccgaatccggatatgtcctggatgctagccaacatcgaccgtgaggtgatcagcgcggacgaggtgcagatcctcgaatgtaagaccgccggcataaacggggcacgtctctggaaggaaggcgtacccgagtatgtaaaactgcaagtgatgcaccaacttgcagtcaccggcaagcaggcggcagatgtggcggtgctgctcggcggtcagcacttggagatccatcgcattgagcgagatgagcagatgatcgcccgcctgatcgaactggagcgtaagttctggacctacgtggaaaccgataccccgccgccagccgacggcagtgcatcggccgaggcggctttgcgctgcttgtacccggaggacaacggtcagaccgtcgacttcagcggccatgcaggattgtcggaggcctacttagagctcaaggccgtgcgccaatccatcggcgagaaacaaacgcgcgaggcccaacttaagcagatgctgcagcaagccatcggcgaggccacccgagcggagttctccagcggatatatcagctggaagaaatccaagggctgcaccgtgctcgatgtcgaacgcctactgaaagagaaaccttacctgcaggttcgctacgccaaaacccaggaaggcagtcgccgcttcctgatcaactgactccgctattccttacttccctccccttggccagtccacgcagttagcgctgcgtagctggccttttttcattttcaggagaaccatcatgttgaaaggcttagccctaacgccgcccgtgctcggacgcatctccatcggcaaagtcattgaaagaaacggtaaacgcctgccggagaaagatgatcagttcaccatcacatcccaggtacaaagcagggatggctggctgctacatccactcaacgacgaactgcgccagagtaaggaagacaagctgcgcagtattcctatacgcctattgttcaacgaaccggagctgaatttccgggctgattacaccctgttcgaccggcagtccgggcgaccgttatgcgtgggcaatggtgaaacctgcaagcgcgctgcccaggacggcatacagtctctgccctgcccttcgcccgatgcctgcccactagccaaaggcggtgcctgcaagccttacggccgactgaatgtgattatcggtgatgaggattcgttgggtagctttgtgttccgcactaccggattcaatagcatccgcaccctggccgctcgactgcattacttccaggccatctcaggtaatcgactggcttgcctgcctctggagctgcgtctacgcggtaaatccacccggcaaagccatggcacgccgatcttctatgtcgacctcaccatacgcgctggcatggatatgagcgaagcgctgcagaaggcgagcgagctggatacacagcggcaaacagcaggtttcgatcagagggctctagatgacgcagctcgccgaggctttggcaacggcgccttcgaggacagcgaggaggacagtcacgtcgtgatcgaggagttcttcgtaaactcggagcccgccagcacctctagccagggtgaatcgcagtcagctcccaactccctcgcggcaaaactagaagccctcacgtcgcaggcccactgaatcaaacctgtcggtgccgtgtacatcggccagatacaagatcttggagtccagccatgtcgctaatgcgatttttgctctgcttgttcatattcgtcggcgcgcttgcagccgccggggcgctggtgctgagcattctgctcatgctgcgctttccagcgctgttactggccgttctgctggcctgctggatcctgagtcgcttgctcagactaatttccccaagtcggggaaatcccacctgaaatattccaagtaaccgtcagcggccatgcacacggccgcttttaccaggagaatgaatcatgtttcgatactgcttgatctgcgactccaaggccgtcctaaccagggaggcagccaaaggcatcgccatgttactcggcctgctgacagcgcgctgcgggaagcgcagaaatctaatgagaatacccaagcgccaggcagccatctgctcatcaatggattagccgctatcacttccgcgtatccaccggcgttgcgggtagccgaggatgtcgctaaatatcacttcgcggggttcaactgtttgtgcctacgctgtggtgctctgttcgacgagcctggggaaaaggaatcctctaaaacaacaaagcaaccgccgtgactgagccaatcagttgcgatcaagcctagtaacaagacgctccaccatgtccatgacgaagtcgcggtcatacgcctccagcctagacagcaagtcatagagcctgcgcgcctggtcctctgggcgtgaactcccctcggtcagcaggtcagccgtttcacaacgaaaaaccgctgccagctccgccaaacgctcgatgttgggcataacgatccctcgctcgatacgggatacggcctcgcttccaatgccaagcctttccgcaacctgctcctgactcaacttgcaacgagcacgctggcgagcaattgcttggccaacaagctcagccagctgcttcgatttggtttttgacatgcagccctccagttcaacctgaatggttggctatcaacccgttgacatgaaggacttactgggtcgagactcacccttaaaggttgtaattcaaccctttctcaaaaccactatctcttgcagggagctcagaaaacccatgatcgtcgtaacagatctgaatgaagcgcagattgaaggtctcgtgaaaaataaagcgtccttcgagatccatggcctcaggggtaatttcatggcaggtatcaaactggttgaaaccaagattgaaagccaggggctgaagtgtcgagtcaaaagcgatgtgaaaagtgcagtggtacaaggcggcgcactcggcgccatattcaccgttctgacaacacctgcaacattgaccatagcgacattaacggcggcagcaggcgtaggtcatacgctcgttacgtacaaccccgactacgaaatcatcaaggactacgtcaacaagcggctcaaggttgtttacaagaaatagcagctttgctcagccccctcgtcaaacccttcaagtaagaaataaaccatgaaacatatcctctgcattcttcttctcgcgtcctgtgctcaagccaacgccgaaatctccgcataccaaggttcagcggctttctttcccgacgaaaaatcgaaccacaaccttccggaagcgattccatgcgtcacccgcccagcagcgacgggtcaaccgatgctcttttgtacttggctcaccagcacgcgctacgtggatatctgggacgctcagcgccagcaaaacgtccgtatcaccaacaaggtcaatggcatgtgtcagcgtggcaactgccgaatccaaggtgcagaggtaggccactggaaggagaacaccccattccaactctccatctggtatcggataggcagtagcaccgatggcaaaccagttgcctaccgcaccgacgcgactcggcaagtatcgtacgttgaagctggcagtctattgatgaagttctacctggatgcaggtgtcccagagaatgaactggcttcaaccttcgacaagcgttacaccggcggttgggcagcgtggaatcaggagaaaggcgggaatgcatcaaaagcgacgaacaccccggctgctcctcagtccgaatggccagaagtcaaagccgcctggtgcaatccgcgcatggatgatgactgttacatcaacagcaaaaaagtccctattgccgagctgggcaaatggttaccggacattagcgaatcgaatgccgaccagctaggaggtcactgcgagaccatcctctgcttcgataaagatgaccaaccgatgggctatcttttgcaatgaggattcgagcaccgctggccaggctaagacattcgccttgctaatcctgaaagcagggggcgtaagccccctattagcttcacttcagttttatttttggcgaagttaatattcgcctcgcccaaccagacgactgcattttaatgcagccaggctcgtaagcagccagccatcgacgctggcagaagccgataacggcttttgccaaattcccctattacctatgtaatgtccgcgactacagcaacgccctaaagtgacgtttgtccgcgtccgaggacttgaggatgcggtattccatgccgctagccacagcgatctgctgggcaaagtccttcttggcttgcaccacggcgtcctcaacctggtagtcggccttaacctcaacgatcacgtacttcaggctgccgtccggctcttcgcgctcgaaaatgaagtcggggtagtagctgcgtacggtgcgcgaatctggatcgatgtactggataaagaagtcagactgcccgtgtgtcagcattccagtgaagtagattttcttcacccgctgctcacgcagcagatcccagaacaaccagttttccgagcccgaatcaaagcagtaagtgtcgaggtggaagctcttcgcgcgctccgcatcgctaatttttggatcgtcacgccggacgatcttgtccttagcggctgtgacctcgtagtagccgctgaccggcaccttaatcagatcgatctcccgttcctcagtttgctgcgtctcatctagatcgtaaagctgacgaaataggcgcgggatgatttcgtcgtaaagaagctcgttgaaatggtttgtgatatccaccaattcttcggtgccttctttggtcgaatccagcagctcctcgatttccaacgggctgcgattgagatagcgcgacacctcagcaaccagagtcatgcgcgagaaagtgcgcttctcacggcgcaccgtcaggtcgaaggtacggctgccagacgcacgagccgcatcggcggcagtcaaaccatcctgctgtgtctcgatcaaccggtacttctcaaccaatgtgctccagctttccttatcggcacgatcaagtcccaatgcttgaccgggcgttaactccttctcgctcacctgaaattgctttcgaacgcgcactagcttgatcttgaccggcggctcagtcacgcgcactactacgcgctccttatcgcttcctgtcttttgaagctcatcggcgctgattcggaagttctgctgcagctcatcattgaggatgttcaggttttcttcagataagaagacgtgcccggtgtgctgagcctcgccgatggagcgcaggcagcgcatcgtggcttgcaacacgaacaccttcgactttggggcacggaacaaaccaacgccgaacagagagcgacagttccagccctcgcggcccttgttaaccagcaggatgaactgcttctccgagctttcagtatcgagccggttgaactcgcgaatgtcgtcgttggtagtaagcttgttgtcgccgacgttgaccaagatgcgcgaagtcggaataccgtgcttgagcagcgcgcgctcgaccgccggtttcagttcgctagtcaactcatcaacggtggcggcgaagaaggccagcttgggcaatagaccctctgggcgaagatcgcccgattccctcaggaaagcctcaattgcgatgcccacaaactcgtcggtgcgggtgttggcatagccgtgcagcatcaccttcttgaggtaggccttgtcaacggcctctttcaggccgtaggcataaaccacctccggcagtacttcacgcccgacgtagggcgtaccggtgtagttgtagcaagccaccactcgggtgcctgctgcattaaggctggcagctaggatgtcaatggtggtgcgtaggctggtatcggtttccttagtgccgacacccatgtccttggccagcgccctaccgaaggcgtgatgcgcctcgtctacgtagatgcccaactgctctaggcggcgtaatttctcgaaacgctggttggtggtcagctcgccttcttcctcgggctggtcgaagttgtagaggtcagcggcgtcggcgtagacaccagtcgcagttagtgtttcaccggtcgcaccgaacagcttatcgacagagttcttttccttgtgcttgcgcttaaggatgatcttctgtgtattggagacaattatgttgaagcgcgaccgatccaacgtatcgagcgacgtaccagcctcttcgaggtagtggaaacgcaaatgcgtggtcaggaagtttacatattccggcggcacgacgcgggtcagatcgaaggactcgatctctttcaacgattgcagtacggtcttgtccggcgcaaacaccagcgcgttgtgacagtagcgcgcgtctttctcaaacttattgcccaacaggaactcataaaaaatacaggtcgccatcaaaatggttttaccggtacccatcgtcagcgcgaagatgtagttcggataaacacgtgagtttttccgcatcgcagtgaacacggccttgtactgatcctgcgtgatcttgtcgaacaagcccacttgcccagcattaccggacgctacaccgccttccgtacgatctgcgaaacggccctgcttctggaaccactgttgaaatacttcctcaaccttagcgttgccaaggaactccttaaggaaaacgtaggtttccagcgcctcgaactgtggttgccgtagaaaggccttggggttcttttccggattgttgaagtcgaggaacttacgggtgagctccttatagttctggcggatcacgcctcgattggactggtagaactgccagagaaactgaaagaaggcgaagtctagcgacgcactcactgccttagctgcgcgcttagtcgccatggctaatgctcccttcccaggactccgacagcaggtcagtgatcttcacgcgaatggtgcctgcgtcgtccggtaccttgtaagcgcccgtaacaaactcgttttttcctggaatgtccaccaccgccggttggagtaccgcaccgtcgtagttccagtcgatcaacacgctttctgccagctccttccaatcctggatcgactccttttggagcgagagcttttgcagcaaattcatcggatagaacctctcgatgatcaggtcatcgtccttaatggataccttagcctgcgaatcgcgcttgaattccagatccgccttgtcgcgtaagatgtcgaccacttccacatctatcttgaaaggtttggcagccaattccagttgggcggctaagtcgggctcatggcccatgcagacaagggttattttctcagccggtcgattcgggctttcattctgcttgcgctcccacgctttgtaatcgaagcctgcaatcaattcgttcagatccgcgcgcgtggcgatgcggttgacgggcatgatcttgatcatgcgtccgtccttctcgccatcaaatacagaactaaactccagcttctgcacttccagcgcctccaacagtagctctttggcttggaccgggttgcggaagatgtcatagtggtttacgttaaatatttcaaatccagctctgctagtttgatcagaggcaatacgaatcagcctttgtgttgttgtctgaattgcaccgaggtttatatctgcaccaataaatcgacgcccggctttcgtagccgctgcctgtgttgttcctgaccccatgaatacatctaacactaaaccatttgcaggacagccagtttctataattctccgcagtagtgtttctggcttttgggttggatagttttctcgctcttgcgcttgagagttaacgggctgaatgtcgtcccagatcgtggttagtggctgcccttcaagctcgtcaaagtaacgcttgtacctagcaactcctgaggaggtatatgcgagcaagccttcatcatgaagggcttgcattttttccttggtgactcgccaaactcgggttaccccgttccattcatactgcaaatttggtcgatcagggtttgggttattcatgttgtcgagtgtgtattttcgaccatcaccatcatcctgattaaaccgtgcaacatattcttccgaatatttaattctaggcggcgtccaacttgtattcgtgcctctggcatagcaataaatcgtatcatgagctgtgctgagacccatcttcacgtttcctcttgcagcagctcgcttccagataacttcggaaacaaagcgatcaggcccaaaaacctcatctagcaagcatcgaagttggtggctcttatggacatcgcaatgtaaccaaatagttcctgactctgtcagcagctcgcgcaagataatcaggcgttcatacatgtattgcagatagtcatcattcagccaaatatcgcgatattgcttttcttcaaatgcagataccccggagtccacccgctttcctttaagggaaatagtcttgttgtaatcgactcgggaatcaaaaggggggtcgatgtaaatcaggtctaccctccccctgaactgctttagcaaatgactcattacctgaaggttgtctccccagaaaatcttgttgcgccacccgtcgacctcttcgccgtggacttccttcaactgagcagggtaatactgcgtcgaagtaaacgggcgcttaccacgccagttaagcatcggatagcccttgattggctcgaattggtacttctcgacgttggtggcgtcgccatcaggcgtggccagctgcaagctttcctgcgctggggtaatagttttggtcatttgtcgttgttcctgaatttccaattcttgttgtcgcagtaagcgcgcatgtcacagttctggcacagcttggcagggcgcgcagcgattcggtagtcctgctgctctatgcgcgccacgatgtcgtcgaactgcgcgatcgtcttgccaatggagcgctcgtctttgctgaaagacacgtaggggttacctccgtcctcacccgtataatacaggtgcatccgactgaccttttggccggtacgctcctcgaccagatgggcataaacctccagctggttctggtattgccggagtcggctgcgatccttctccatgtcgggttttttctccgacttgaagtcgatgatctcgactgtgtcatgttcgccccgaatgaggtcaacgctgcctttgaggatgtaatgatccttgaccagcgaaatctcgacctcggcctccttgatgcgatcccagttgccgttctcgcgctcgaagtagcgcatcacgtgaagcagtgccgcctgctgcgagctgggggcaaggtatacgcgctccttcttggaaatctgggtgtaatttgccgagaaccaagatgcgatgagctctttagataaggtacattcctcaccgcgcagaactgttttgtgaatatcttcgatggtttgatgcacaagtgtaccgaacagcatggggctttcgcggatcggcgcgaactctaaatccttgaagaagcggtactgctcggcgcagttttcgaacacggtgatgtgcgaagtgaacgaatactcgcgcttgaggttaatctgcttaaccgcttcgtaactgaggctcgcgagatcaacgtcgcgccagctcggcaggtcgtagaacagtcgttcgaagtatttggatggcgatttaccacgcccctgtttctcttgcgcagctagcaccaacagattctgcgcacgggaaaaagcggtatagaacagtcgccagaagtcgaattttttgatgtggtcgagcggttcgaagcgctccttcgagaggtagcccccgtcttctagcaactcgtcgagtgcgctgtattgcttccttggtaccgcctccagcgacccgcagaccacgactgggaactcaagccctttggactggtgaatggtgaggaaagacacacagcccttgggcgcatactctgcctcatcttcatactcaccaatgccgccatccaccagaaagcgcaaaaactggttgaagagatcacgaatgttcttctctagccactctgggttgagcacgctgacgaaatgtaggtactcgaacttagtgagcagcttggaaaaagtgccgaggttgcgcgccgcacggcccttgtccacaccttgcactgcgtcctcggaaaggaagcgcgcgaatagcgggaactgaagcaactgataaaataggccggagaaggagtagtcggtgttctgagtcaatacggcgtgacgcttagccagcggtcgagcccaatccaacagagacttattctccggctttcgcagttccgtggtaaaggccgcgaaacactgccggtcgtagtagtcccagatcggtagcgtgacaccttcgacccacgcccgcaccttggggaactgcggaaacaggaagatcaacgcgccgatcattaggcgaacttcttcgcgcgcgaaaaacatgttcgagcgaggtgagaacacgggcaccccttcggtttcgaggaaacgcgccagcgcgaccgccttctcgctcttcaccgagcggaatagaaaggcgacctgattccagtccgtcagcttgcctgtagccttcatggtgttgaggaaggtcagcatctcggcatgccaatttttggattcgtcattactgtcggcggcagcaagtcgtaccaccgtagggacgtctgggaagtcaccctcacgcgggacaatctgcttggcgaagcggaacacacgcgtgccatcgtcccacgtctgctcgcgcatccattcgttgtaaaagcggatgatgtctggatgcgagcgataattgacggtgagcgccacctgcttgcactgtccctcatcgaagagcgatgggaattccaggatgttgcggatggtggccccacgaaagcggtacaagccctggtcatcatcgcccacaacgcacagattgcgcttctcgcccgccagcaacaggagaattcgctcctgaatggtgttggtgtcctggtactcgtccaccatcaggtaagtcagtttctcgcgcaattgcgccatcacctcggggtgcttttccagcagttgcagcgcctcgaactggataccagagaaatcgagagagttattttcgtgcaacagttcttgatacttgacaaagcaggcggccagcgcacggacctccacttcgggagccgccgccagcatagcgaggtcgagagcttcctcgccgaccttgttgagccacttgagcaagttctctgactgtgcccagcggcccgactggtcacctcccataatgagctgagcatcaggcagctcacgaaaatccttgatgcgctggtagaggaagtattgctgatcgaactgatcgaacagcgtaaagctgcgtttgagtcgtgtgaactcgcggaagtcttccaagatgcgcagacagatcgaatggaaggtgccgaggtacatctcattcaggttgaaacggatgcccagttctgcgagccggttcgagattcgggtggtcagctcgcgcgcagctttatccgtgaaggtcactacgagcagcgactctggtgacacccccttgtgcgtaatcagatagacaatacgctcgaccagcgtgaacgtcttcccagagcctgggcccgcaataataagcaccgggccgtcggtggacaggattgcttcaagctgctgtgggtttgctttactttgaagaggggttacaccagaggtcattccgtatcctcgttatctgccgcacatctgacgatgcgacgttctatccttcgagtcaggtctccacgacggaggcgcctggtaccacccagattcaagcctgacagatcaccgttcgctgcaagatgataaatcgtgcgtttgcttgccttaagttagttaggcagcagcctcatcgatagttagattctcgtctggttgggcgctcatctggtcacctaccaagctcaatggctggaatggtctattcgtgcatctcgtcatcaggtgtcacaattggccaaacctggtcaagtatggcatcaatctcgatactttaacgccgcattgagggaactttatggcgtccaactacgaagcgatctgtgaagaaaaccagcggcgctatggtaccgaaggcgctcagaaatccggagagctggccgctggactgtatgacgaccgcacgcacttcatcttcgaactactacaaaacagcgaggatgctatcggtcggcgcggtaattggcacggaccacgcaaggtcacgtttattctgaccccgacaagcctgacgctatcccacttcggcaaacccttcgatgaagcagacgtccgaagcgtatgtgacatcgcagagagcacaaagaacgagttctcaattggccgcttcggcctcggtttcaagtcggtctacaccgttaccgatctcccggagatacattctggcgatgaggacttcgccattgctggttatgtattcccgaaacggacggctcgcacggcacgtgaagcgaacgaaacacaaatcatcctgccccttaaaactgaggacacggccgcgccgcaggaaatcacagctgggttccgaaacctgggacctagcgcgctgcttttcttgcgacatatcgatgaaatcaactggagtgtcgatggtggcgcttccgggttctatttgcgaaacagcccggaattgctcggacacaacgtccagcgcatcacggtaataggccaagaaagcggccaacccgaagtcgatcagaactggctggtgttccaccgcgacgtattctccgccgaacagcagaaggtcgggcgggtggaaatcgcctttacgttagtctcggaaaaaaccgactccgaacgcttcggcgtgcaaccactgaccacttcgccactggtggtgtacttcccgactgtcgttgagacccacctaggttttcttgtgcaggggccgtatcgcaccacgcccagccgcgacaacattccgccctctgaaccgtggaaccaacatctggtcaaggaaaccgccaacttgttattggaggcgacgcgctggatgcgcgacatggcgatgctagatgtctctgcgctgagctgcctgccattcgaccgcgagaagtttccgcaaggatcacggttcgcacctatgttcgatgccgttcggcagtcatttcagaatgaggctctgctactcactttcgatggcaaatacgttaccggcaatcaggcaaagctagcgcgcacgcaagagcttcgagagctgttcagtccagaacagctcgcactactgtttggctcggaaatcgccatttggctgactggcgacattacccaggataaagcaccggcgattcttcagtacctaactcgtgagctcgacgtcgatctgattacaccgacaaaactaataccaaacctgactaagccattccttgaggcgcagcccgacgaatgggtgatgcgcctgtatgagtttctgggcggccaggaagcagccttgcgccgccgcctagacactattccacttatccgccttgaggatggtacccacgtcattgcccaagagaatggcgaggtgaaggccttcctgcccagcaccatcacaaccggctttccgacagtacgtcgtgctgtatgcgcttcgccagaagcacgcgctttcctgagttcgctgaagattacggaacccgatccggtggatgacgtaatccgaaacgtcttgccaaagtacaggcaggacgaagttaatgtggacgataatgcttacgctaccgacatagaacgcatccgctcggccttcagcacagactcggcgacacagcgagagaagctccgttccgccctgcgcgagaccactttcgtgatggcggtcgacactggcgacggcaaaggctacgtcagcaagcccagcgacatttacatcgccacggatcgactgaaacagctatttacaggcgtttcaggtgtcctaatcgttgacgatgaatacgaatgcctgcgcggcgaggatacacgggatctgctcgtggcgtgcggcgcaagccgttatctcagtccgcatccagccacctctgagttggaggcaaccgaaaaagctcagatccgcaaagaagcggggctggaacgcgcaagctgggagagtcggcctgaagattttactattcgtggactaacccaactactgaagatattgcccaagctgggagcagatgacgcgaaagccagggccggactgttgtgggactcactcgctgaccttgaagcacgcggcacaggtgctttctacggttactacaaatggggctattctcacgaaacgaaaacagctcgattcgatgcagctttcatccggactctcaaccaggttgcatgggctcctagtaccaatggagaactcgtgcctcccggcctcgtggtgttcgacacacttgagtggaaacctaatcccttcttgctgactaagctcgccttcaaacctccaatcatcgaccagttagccaaagaggctggtatcgatcccgcggcgcttgatctactacgcaagtacggcattaccagcgttacagaactggcctcccggcttggcatcaccagcccaccgcccgaagttgagtcggcatctgatgcggagcccgaagccccggaagaggcgggcaccgacgtttacggcaacgcgcaagatctgtacggcgacgatatgccagaaattccgccggggacatctgatcctgatggcggcgacggcgcgacaagtagtacgggccgtggtggtagcgggcacactggcttccgtggtgagaactcgggcaacgcaggcgcatacggtagctcaggagggagcaccaaccaaggcggtaatggcggaaccagtggaaatgggcaagggaaacgttctcccggccatgccggtggacgaccgtttatttcctacgtcggcactcaccccgacgaggagacagatctagatggcatcgaccaagcgatgcgcatgcacattgaggagcaagccattatgctgatcattgaactggagcctatgctgcgacgcacgcccgaaggcaacccgggatttgatctctacgagacaggtagcgatggtaaggaagttcgctggatcgaggtcaagtcgatgactggctgcctgaaagatcgcgccgtagggctctctcgtacgcagttcgactgtgcgagagagcgaggtgctgattattggctgtatgtcgtcgaatacgcgaccgatcctgttaagtctaaagtgctgagaattcaagaccccgttgctcacgcccggacgttcacgttcgatcatggctggagccagattgccctaaccgaaccgccgtattgagcggcatctcggtgattctcgactcaacaatgaaaccctccagaatgagggattcaaagcagccaacatcaatgtataaacacaccctagcctgcctcagtaatcaaaagtcagtcggcctggcctctacgtagacatttagccctcagcggcttcaaccgaagctgctgagcgtctttcaccaggtaacgcatcgccttatgtacattgcgccggatcgttcgatcgtttcgtaaaacgatgccgatcccacacgcgctttcgtatttttctttatcgtgattacagctattgaagtgaccctgccccctagtgatgcgcccccacagttcaccgacttgctgtgccttgtagatgtctccacgaacctcgttgccattgaagaagtaggccgcatgaatgtgatagccccgatcctccccttgctcaaccgcacagatgtaaccagtgagatgatcaaagatcgggttgcgctgatgctcggcaatcaggcgagccaggtcatcgaacacgtgctcgacacgcaacctgacctgggcctcttgtcggtagtaaagatcgatcctgataatgttggtgcgcgagtagcgttcaaccacagcatcggaataatcacaaacacggtcctcctgctgcatagcctgacgacgacggtcaccctttttacggcgataccatagctcaagcgtcaactgacggatccgtgctaccagcacgttcatgctgtgctgatggtctagccaggccgtgccctcttcattcaagcagacaggaccggtaggacgacgttccaacccaatgtcctgacaagcctccctgaacgcttgcagatgctcactgtagctgtattcaatccggtcatcgaacagatccatcatctgcccgatatgagtaaagtatctggagagtctggtctcctcaactcgctcataacctgtacgggtttgcctgaaccgaaatgctgggctgtcatgctgctcgatggcctggacaagtcgttcaatctgaatggcgatgtcggactgggaaagataggtgtagatgttgcgcttggtcatggtgacgtgcctgattggtggtttgcatatcaggtacgtgcgctatgtactttttaactgatgacctatcgctagcttgaggtaggtggtgtgctgctgagccagataacctattgaatagttagtttccgatagttaatagctatataactagaagcacctcgtcccacggtggacgatcccggccaggcttggcattggggagctacattgcccagccttccgagagagtgcctcattgggatcatgagagagttagctgagaatgtaaggttccgaccagcagcataaacaccatgaccagctacaaaccggtcatggcgtttatgctggtttctagctggccatacttaggtgtccggtggaccgcactgcagctccctcagccaggtcacgctcttcgatccgtgccaggatccaatcgtgcacctcgctatcgacccagccgacgcagcggtcgccgagagataccggtttcgggaagctaccttccgcgatgtatttgtatatggtcgaccgggcaagacctgtcgagtcgatgacttcttttaaacggatgatcctcatgaacgggctcctcgtattcgttcagaggattggcaggggcgataaaaaataaccgcctaaacggctgtcgctcgtgctggcgtgagcaaccccgctttctctctaagctcctcagggcaaagggcttccgtagtaatcttcgtcgttccagcgtgctcgccgacttccctcagcagccagccaccgccagcgcccccatctagcaacatccccaaacaggaataacctagtcgcagatcactgggtagaagtctgaagttcaggcttgaccaggcaagtccatcaatccgtgaaaagcgcaccttgcacacccgtgcaaactgaatagtcatctcccaaagaaaatctatgatctcagtctcgtcgagcgagctcgcatcttcaacatccctcattggcttacgaaaaaatgcgctgatgtcacctcggacgccaaggaaaaattctgatttagctacatctagctgctcccagtgccgcgccagaaggtctgtcacgcaaccgctcagaaaaaactggagttgctcaatcgcgtgtctcggagcacgcctaaaaagacggagaaccgaggccggcgtggaaaattcaggcaatgagtatttatgcttagtagcggaattacgccagcgctcaagatcaaaccaaacgtcccctatataccgcacatcatcagcccattcgtccgcacactcatacacaacgaagccgatcttgtccgtccccaaggtggtttgccgatggttcaggttaaggacataactgcttttgagtttttcagcataaatggggctggcgactccgggcacgtgtcgccgaataaaccccatttcaacaagcttcttaatccgctgcttaagacttatctgctcaaggccggtaagtcgacatagctctacattcccgagcgaatttactacgccaaaacggtctgcatgagcggatagcactgcaagcagaagtcgattggatcgactgagcagtgaagtgcggttcggcactgctgccctcgtttgctccgccttcacagtaggcatcgaatagatttccacgtcgggcctagtggcgtgaatgtaaggccccttgattaggtgctcgacggcgccaaagtgcggcgcaagatcgatggggcgcgaaatcaaactcgcaatcccgagcttattgaccacgtcgtcatggatgcgaaatgattttttcagccgaccggctcgttgagccaacgccgttgtagcgatgaggatcgattcttccaagagcgagttgagcgtattagcacattctctcgtgggcactccaaggcaaccagccagctcatcaatagtgatcggccctgtggcagtgaactcataacgcagataaaacgaagccagcgtgaaccgagccttcgaatcaagccgccctaaatccagtgataaaatactatttagcatatgaattccgaaaataattacagctaaatataccctattttttcaagcgaaatctaataacgttattcataacgttatcaataatgaatatactggccctaaccagttctccagcaggaatagatgaaaatgggacgcaaaagggtagttgggctggattggcttgatcctgaaaatacgaatcaacgcctttgggccttgaagtatttgcaagcgaaaggcttagagcgaattttcgatagcggggagaggatccttccgaatgagcttccgtcccacaacgaaatgctggatgcaggcatgtatatcgagcaggacgctggcgcgagcaaactatttcgcgacatgaaggatgcttggcgccaggagagagacagaaacaagaaaaaggagagcggccgccaagtgtgcgcattcactctgagtacagccaccaagagccatctacaaaccatggccaaagagcaaaaaaagagccccgccgtgctgctggaaagcatgattacaaaggcttacgcagcccatgtgcgcagacagcaaaggcaactgccgaaacaaactctgcaagggaatcgtcagcacacaattcaagaccttcacgagatgttcgtcggaggcgccatacaatccgataactcagccatccccagccactccttaactgaagaatcgatgggtgaacatgagctgccggagcagaagtcaggcgagtacacttcggtagcttcaaatgagcgctctagatcgaagggtgccccagaaatcgttgaatctctgcttgagcaggaagaggctattaccctcattccagattcatcgtgcaatagtcaaatgccgtccgcggcggcagaggatgatcagccagaacaagcagcaccggtggacttaaattcaagcccgaccgatgatttcccttacgctcaaaccgaaaacccttcatccgtggtgaaaatcagtccccaaaagagaaaaacgttcaggttatccagcgttcgctaaccaaaagcctgggacaaggaacaacgtgattaactgtccgatctggagcgacatacaacgtttggcattccaaatggcattccatgcaaaaaataaaaccgatctttttcttaataaacaacaacttacatatcctgttcagattaccccggcgcatcaacagaacccgcccagtgcgggttctgttgtctctagggtttgaaaagcccgacaggacagaccttcagaattttccttcaagctatcgcgcccttgatgaactagcgcaccccgcgccacaacgctaacttcctcccgtcgctcctaatcagcgaccggctttgacaggccgaaaagtgtaatctttcacaccccttgataagacggcatgctttacgcattccgcctcgttcatggcggctgtgcgtggggcatcttcgggtgcgccgggttcctacacttccggtctgtcaacccgcgtacagctgccacccattcctgtttgacagcaggggcggtagctccttaaacagtgtgggagcttcatcatgaaaaagatcacccccaatcccccctccacaaccctcttcaccctcgccccagacatctcccccgaaaccctgctaatccaagccagcgaaaccctcgcctcactcaacgccatgaccaccgacctggccttcgaactcgaaggcgcccaccgtcacaagctgctggccactcagcaactgatcgtgctgggcgaactgttggtggagcgagtgctggtcctcacccaagccccccaaacattccagtaacaaaaaaggccgaggaaactcggccttttgctgtcatctgcctcagaaatcccagcgcgtcgtcaccatcacattgcgcgggtcaccgtaatacgccgagtcatagaacccgatattggtgaagtatttcttgtcgaacaggttgttgacgttaagcgtggccgacaggtttttcgtcagttgatagcgcgccatcacatccaccagccagtacgggtcctgggtgaatttttccgagcggccaccgcccggatagccccagttacgcacggtttgccaaccggcgctctgccagcgtgtgccaccaccgagcgtgagtttgtccaggctgccttggagtttgtaactggtatagagggtgacctgatcctcgggctcccaggtcgctacttttttgccatcggcatcacgcgcaatcttgtgggtatagcccgcctgcaactgccagcctggagccagttcgccggagatttccgcttcgtaacctttggttttgctctcggtgcccatgtacgaatagtcgacggccggctgggagttccaggcggtatcggcgattgggcgattggtctcgtgcacttcgaagtaggcgaggctggcgttcaggcggccatcgaagaattcgcccttgaggccgatctcgtagtttttgccttcgtccggttcaagcatggtgttggtgcggtcgcgatactgggtctgcggcttgaagatttcggtgtagctggcgtaggcggtgaagttttcgttgaggtcgtacgtcaggccggcgtacggcacgaccttaccgctttcttcggtgtcgctggtgccggtgacttgatagttggccacccgcgtgcccagcaacaggtgcatcgcgtcggtcaggctgaagcgcccggtgatgtaggtgccggtctggcgcgtgatttcatcactgaagcgggaggccttgccccatgccggttcaatggcttcgccgtgccagttgtaaaagtcataggaattgttgaagtagacagggttacggtaatccttgcccttccagcgagagctcgacacggactgcccgatcaccaattcatgctcacgcccaaacagttcaaacggccccgacgcgtaaacatccaggctgtcgctggtggtgtcgccggtgtatttggcggcatagatcgaactcgccgtcgcagaatcctgggagatgtagcccagcggcgcgtcatagccattgacctgatggttgtactggcctttggtgacccagccgttgtcgaagctgtgttccagggtggcgaacacggtgtggctgtattgttgccatgaaccccacttgggcccgttgttgaacgagcgcggcaggtcgagtttgttgccggtggcgtcgaagatggtgcgggtgccggtccagctggaacctttggggtcgctgtcctggtagtcggcgcccagggtcagcagggtgtccggggtcaggtcgacttcgaggatgccgtagagcacgctggtcttgcgtgagtagtgatcgaggaacgactttctgtcttggtatgccgccaccgcgcggccacgcacgttgccggtgtcggtcagggggccgctgacgtcgacctgggaacggtagttatcccaggagcccgcgcccagttcgatgctgcttttgaactcggaggtcggtttcttgcggatcaggttgatggtgccgcccgggccaccggcaccggtgagcaggccggtggcgcccttgagcacttcgacgcggtcgtagatcgccatgtcagtcatggtctggcctgccgagtattgggcgtcgcgcagggtcggaatgccgtcgtactggaagttctcgatggagaaaccacgcgagtaatagttggtgcgctcggtgtcataggtcgacacggtgatgcctggcgtgtggcgcattacgtcatcgatggagttgaggccgaagtcatccatgacctggcgggtgaccaccgagatcgattgtggtgtttcccgtggtgtcagtaccaggcgcgtggccgtggcgatggtgcccggggtatacgagcccgtgccttcggtgaccgtgccgagttggttggcgctgacttgggtggtctgcaactctaccttgccgtcctgggacaacggcttggcgaccacgcgatagccaccctgctcgtgctccgcctgcaagcccgccgggctcaacaggtgctccaggccttcgtccaccgagaaattacctttgagcccattgctctgaatgccggctgccagcgccgaatcaatgccgatcatcacgcccgcttgctgcccaaaggcccccaacacacggtccaggctaccgggcgaaatgtcatacgcacgaggttgggattgttgctgggtaggcgccgcagtggcggccatgatgctgtggcttgcggttgccaccgataaaccgaggataacggtgcgcaaagcgctgacgcggctgagcataaagactgtcctgtcgtgaaagggttgggtggacgcttttttctgcgtcttacctgtcttgatgctttagatgggaaaacctgccacgcggtgaacactatttttcggtcaggcgggcacgacggtcgccaggtagccaaacacccgctgcacgcgcacgggcagcaccttggccagcaggtcgaggctggcttccggctggtccagcgagaacgagcctgacacctgcaaactcgccaccgcagggtcgcagcgcagcacgccacgccggtagcggtcgagttcttcgagtactgcgccgagcggcatgcgctcggcgatcaacaggccttgggtccaggcgtcggcggtggatggcacggctgctggctgactgctctgaagacgattgaagatcaattgctggccgataccgagttgcgtgccgacaccgtgcaacggctcgacagaggcgctgcccgagagcatctgcacccgcgtaccctgctggcgaagcaggtcatggctgatgatgatctgtgagaatgccgcaggccgtacccagccattggcagtctggaccgcaatgtcggcgcgcgtgcctgtggtcaacagcagccgaccgaggttcagcgccaagtgggcgccacggatatccacagcggtgcgcgtatccaactgcaattccccggcattggccaggcgcaggtgccgtctctccccggtagcggtgtggtaatcgctgaacagctccggcaacagcgcccgctcgcgcacactcaggccaagggccgtggccacgctcaggccggcgaggcccttgagcacggtgcgccgcgatggaccactgcgtgcgcgcaacaattggcgggcgctgggcgcgggcaatgtgtgcgtgtggaggcgcatgtcgcggctgagcccagccaagcgctgccaggccaactcatgttgcgggttatcgttgcgccactgctggcaagcctgctgctcggcggcgccgcaggtgcccgattgcagcgcgaccatccagttcagcgcctggtccaacacgtgctcgtccagaggctgattattggcgggcttgaaacggttcatgccgcgtaaaccgccaggtagcaatggcgataggctttaagcatggctttttgcaccacattcacgctgaggtccatgcgctcggcgatctgtggataagtcaggccatccaactgggacagcaggaaaatctcgcgcaccttgctgcccaacccgtccagcacctggccgacggcgtccaacgcttcaagcaccagcaaacgggtttccggcgacggcatgtgttcgggctccaggatcatcagcgactgttcatacgctcgctccaacgcctggcgacggaagtactgcccgcataaacggctggcgacagtcgtaaggtaggctcgcggctcacgaaaaaccggcacgctgccgctgctcaggatccgcacgaaggtatcctgcgccaagtccagggcctgctcttgcccacccagcttgcgccgcaacaactgcaccacccagctgtggtgctgggcgtagagttcgcccacaacctgatgggcagaagaagatgaggccatcggtgcgatatccaggggacggctaaggaaagtcacacatgataatacttctcattagagacgggttaggagtttctgtcttacctgaagaatgctgcgagctgttgcaagtcaccgatatggactacacccgcttactcaagcagccagaaaagtcctgcatgttggcgcgccgtggatgaactggcgcgaactcggttgctcgaatagtcttcagaggactgctcgtctgccgaagattgaacgcaatcactcaagcccccagactccagcacgcccattcacgaataaggaggcccttcatgcaaagcactgtctcgcccagcccccttgtgggcgtcggcctctatacccccagtgaagcctccctttacaccggtatccccgccgcagatattcgtagatggctattcggttacagttccaacggcattcatcatcccggcctttggcaatcagaactgatggatgtgaacgaatacatattgagcttccatgacctgcttgaaattcgcttcgtgcacgcctttcgtcaacacggcgtgagcctgcaagccattcgcaacgcctcccgacaagcctcagagctgttcggtcaagcctacccgttcacctgcaagcacttccaaacagatggtcgcagcatctttgcgactgttctggatgagacaggcgacgagacactgctggacctgattaaaaaacaatacgcgttcaagcacgtcatcagcccatcgttgtacgaggggatcgactacaccggcaaaggctcggcccaacgctggtacccagtcaaacgcagcaagatcgtcgtactggaccccgccaggaattttggaaagccggtactgactggagcgggtatcgacaccgcaacgctgtttaacgcctatgaggcggaaggaaacgatacaaaacgtattgccctgctatacgagatcccaccctccgctgtaagagccgctatcgagttcgagcaaaggcgcgcggcttgaatttccttctggaccacaacctgccacctgcactggcgcgagcattgaatgaactttcaaaagtccatgagcatggcgtagttccgctcagggataaattcccccagaacgcaagtgatgtttcctggatatcagtgcttcgcgatgaaggtgattgggtcgttatctctcaagaccgctttaccaaagggcatgcagaaaaacaggcattccgagactgcgggctccccattttctgtctggcgaaacactggaataacgagacctattggaacaaggcgcacaatctcgtgcgatggtggccggccatcatgaatcaatcagcgttgataagaggagcagccgcattcagcgtgccatggcgtttttctgcgcccgggaaatttgatcagataaaaatgtaagcctgcaacgcaaaacagtccctatctggaatcccccccccacttacgattaccctgctcccctctatcagacacccggaagtccgatacccgtgttcaagccactcgccatcctcacccttgcctgctcccctctgcttgcaaacgccgccgacctggccggtgtctggaccggcaccttgggcaagtccgcgatcaccgcctgtttcaacggtgcccacggtgccaatggcagttactactaccaacgcatcctgacgcccattcagctcactcaagccaacgccagtgagccgtgggccgaggaagggcaaaccggcttctggcagttggatgagccgcagggcgacacgctgaccggcatctggagcaaaaccctcggcggtaaaagcctggcgctgatgctcaaacgcgcggacaccgacggttgtgccagcgatgcctataacaacgcgcttgaagccgtgccacccgcggtaaaggtcgagcgaaaaaccttcgccgaacacgcctatcaagtaaagacccaaggaggccaggtcatcctgaaacttgaaggcgacggtgcggccatcgacaagatcaaccgcgagctcgcgcgcctggccatcaacccggacggccaggccgatttctaccgggagcggcgcaactcactggaccagagcggcggcaccactaccagcgagatcgcggtagagccgttctactggtcatcgcaatggatcaccgtgcggttctatcgctggtcggcgggctacgggcgggggggcatcagctggggcctacacagttggaacctgcaaaccggtgacaaggtcgacccctggacgtggttgggcggccatgagcaatgggacacgccctactcgggccaggtcaagttgccggctgctttcagcacctggctgaccaagcagaccaccgccgacgaagggtgcccggctgtgaccagttattcctcgttcgacttgagcttcaacacccagggcctgcaactgtcgacgcccgcccagggcgatggctgcgataacgaactgagctttacctgggagcaactggagcctgtgctgaccccggaaggtaaagccgcactgcccagcttgatggcgccgtgacctaccttacaaaaaacccacattcgttcacgaaatattcagaaacgccgacggatactagcccattgcaatgaccgttcccccggacggtcctcctgccctggtagccacactccatgacgcgtcccgctcccctgctgttcctgcttgctggtctgttgttcttctttgccctgggtaaccacgagctgcaaggctccaccgaagcccgtgtggctgggatcgccatggccatgcacctggacaataactgggtggtgccccagttgttccgtgaacccttcctggaaaagccccccctgagcctgtggatcgatgccggggcgattcgcctgtttggcggcaccacctgggcggtgcgcctggcttcggcatttgccgggttgttcagtgtgatgctgctttacacaatgctgcgcaggttcggccgaccgcagacgctggcgttcagcgccgcgctgatcctggcgaccatggccagttattggagcaatgcgcgcggtgtgggtgaggattcgctgctcaccctcggcgtaaccgccgcgctgctggcgttttaccaggctgtgcgacccgatcgtgaagggtcaagcacaggcgcatgggcactgtttaccgccgggatggtgatcgccaccctcagcaaaggcgtgctgggcctggcgatgccgggcattgttatatttgtgtacctggccagcaccagcgtcatggacaagcgcctgcgccttggcgactggctcaagcccgcgctgttcaccttggtggcgctggtgccactggtgatctggctgggcttcctgttccagcgtggcggcatgcaagcggtggccgaagtgttgctgaccaacagcgtcggccggttcagcggttcgtttgtcgaggccgggcattacgagccgttctactactacatcgccaagctgccggaggcattcctgccctggaacatcctggtgtacctgggcctgtggcacttccgtaaaaccctggtgcgcaaccgctaccacctgttcttcagcgtctggctggtggcgcagttcaccctgctgaccctggcctcgagcaaacgcacggtgtacctgatggcactcgcgccagccgccgccgtcctggccgcggagtatgcacgagtgctgctggcgtggctgaaaacccgcaaacctgcgctctacacacatcacagaaccctcgtgggcggcgtgttcaccctggccgtgggctgctatctgattgcagcgttctggtttgcgcccaaggccgatgtgcgccagtcgttcgtcccggtgatcagccaggttcaggcgtttaaagatgaaagcagggaggtggtgctgttccagcccaacgagcgtatcgccggggccagcgtgttctatctgcaggcctacttgccgatcctgaagaccgaggccgagctgcacaactacctaggcgccaagcccggcaacattgcgttgctggaccataccaacgacctggccaccccggtgaaggtgatcaagcagatgtcgatcaaccgccagccttactacttcgtggagcagtaaggccggcgcggggcatcagtgtttggtgaccttgtccaggtaacccatggcaaacgccgagaccacgaaggtcatgtggatgatcacgtaccacatcaggtgctgcggatcgacgttcttggcgtccatgaagatgcgcagcaagtggatggacgaaatcgccacgatggacgccgccactttcatcttcagcgacgaagagtccatggtgcccagccagttgagtttctctttgttttcatcgatatccagctgcgagacgaagttctcgtagccggaaatcatcaccatcaccagcaagccgccgaccagggccatgtcgatcaacgacagcagcagcaggatcacatcagcttccagcatggaaaacacattgggcaagacgtggatgatttcctggaagaacttcagcgccaggatcagcaggcccagggaaagccccagatagataggcgccagcagccagcgtgaggcgtacatagtattttcgataaagcgttccattggatctcacacagcttggctagaaatggcggcgagtataccagccgctacaagacagctgtaaccacgagaaaactgacctgtgcggcatctgtaagagaatttttctgctagtgtcgagcccaataacaactcggctcgatgacgtcggacaggaaaaactcagatgatggatgtgcgatcccctttggccagtatcggcctgtgcgcggcattgctgctggctggcggctgctcccccagtgacgagcagaagcagaccaccctcgaagagaaaaccgcaaagttcgaacactccctggacagcatccaggaccccaagctgcgtgacgccgtcgccgacctgggcggttcgctgctgctgctggagcgggcgcgggtcaagctcgccagcaaacccatcgaagccgagtacggcgaagacaccctggccctgctcaagcactaccccacgccccaggcgctggtggacacctatatcaatggcctgttcgtgctgcgcaagacctcccattcagactacctgaccgacttgcagccggtgttcccgttcagcttcaacatgcctgaccaattccctttcccccatggcctggagtggcagtcggtgaccttgagcaacaacaaggtcatccccttccagccggaatggtcggaaaccgatccgggcatccagctgagccccagcagctccaacctgactaaccccgacgacctgacggtgacctacccgttcatcgacggcatcgagacggaaaacaagagccagccgcagcccgtcagtctcaagggcacggtggaagtggtcgcgccgggcaaggtgttgacctttgacctgtcgaaaaaagacgtgggccacaaacgcaccgagggcaacatcaccctcaacctgctgctcctggaaaaaaactacgccgagatcgagctgaccaacagccagccgctggcgcctgaagtcggcgacgaatcgcccaacccactactggtacaggcacgcgacagtaccgggcaattccttacgcgctccggctcgatcaacgaaagcagcgcccaggtggcgttttatgagaaacaactggccgagatgcaaaagcagaaggcctggtcggaggcgttcgaaaaacagctcaccgatgagcaaaaagccttcgaacacaaacaaagcagccattacgccaaggtgtatttcaatggcgtgatcgacaacctgcaggtcaacgtactggacttttccaccgccacccgcacgcgcaaagacctcgacctgcccgtgatgcgcttcgacaagaacagcctgcagaacagcgtccaggccctgccgatgccggtcaccgtgtatgacgacggcgccgccagctggctcaaagacgcgggcatgaccgaggaccaactgaaaaacagcgtcaccatcagccagtcggttgaagacgccagcgccgcacacatcgtgttcgaccacccgttcaccttcaatgacgacctggtgggcagcgagcgcaacagcagcgagtcgccagtgaccttcttcaccgccgacgaaaaaggcgagcgcggtgagccgatcgaactgccggccgaggcgtttgaattgaacccggcacgcggcaccctgacctacgacctgaacctgttcccggaaaacccggcgtatgtggtgggctcgatcccgctgttcctggcgaccatcgacaaagccgagatcgacgtgaccaagctgcccaaggggctgtcgctcaaggacaacgcgctgatcgtcgaccagaaggagttccccgccgacagctggcgcttctacgccaaggacgccagcggcaactacctcaaggaaatcctcggcgtcagccaccgtgccgaggagtacggcacggcgctgtttgacgtgcattacttctacggccagccgaccgccctggaaagctaccagcgcaccgacctgagcaccgtgcaatacggtttcgaggtcaagctggacaagcccgagggcaaatagcgatcagtgctgggtgtcaccattgagctgtcgcagatgggcctgcatgtgcaggcaccagatctgcgggtcacccgctttctcgtaaccgtgctgggtcaggctgtccacgatggactccagaatattttccgcgacgaagggcccggggaacgggccttgggacttgatagtggaaggctgttcaccggtcattccggcggcaaacaacaaggtccacatcccgttatcccccgcaagagggcgaatggaacattcgatacgggtgaccaggccaaagcactggcgggtaaggcaaaggttgcgcggcatggcggcgaccctcggtagatcggtgttcaacctgcgcctggggcgaggctgtttctatcccgcgactcctgtggatatcccttgagcacagaatagaagaaaaccacgacaaaccaagattgtagggaccaacgggcgttggccctacagtcgcgccaaatttgtgacggttttactggtcatgtggtgaggggattgttgtggctatggggcttgttgtggcgagcgggctcctgtggtgagcgggcttgccccgcgttgggnnnnnnnnnnnnnnnnnnnnnnnnnnnnnnnnnnnnnnnnnnnnnnnnnnnnnnnnnnnnnnnnnnnnnnnnnnnnncccaacgcggggcaagcccgctcaccacaacaagcccgctcaccacaggagcccgcccagcccaataagccactacgccgtcaggtgggcttggcttgcgccaacgcctcctgcgccaactccttttccgcctccttcaggtcatcctcgctgatcatctcggcaatcgcgcgcaaccgctctaccacacgcgcattcaccgtgccctccgggaactgcccttcggcatccggctcaccggcaggctcgcccaccaacaggctcaacgcctcgtccgcctggcgcacggcatagatatggaactgcccggcacgcacggcctgcagcaccttctcatcgagcatcaacgtggcgacgttggcctggggaatgatcgcaccctgttcaccagtcaaaccgcgcgcttcgcacaggcggaagaagccttcgatcttctcgttgaccccacccaccgcctgcacttcaccaaactggttgatggagccggtgatggcgaagcattgcttgagcggggttttcgacaaggccgagatcaaggtgcacgcctcgccaagggaggcgctgtcgccgtccacataaccgtaggactgctccagcgcgatactcgccgagatcgccagcgggaattcttgggcataacggctgcccaggtaaccggtgagaatcatcacgcccttggagtggatcggctggccgaggttgacctcacgctcgatgtcgacaatgccgctgccgcccgggtacaccgtggcggaaatccgcgccggcacgccaaaggccgagtcaccgacttccagcaccgtcagcccgttgcacttgcccaccgctgcaccggcagtgtcgatcaggatgaccccggcgagcatgtcgtcgagaatccgcgccgacacccgcccagtgcgcgtggccttggccttgagggcgcgctcgatatgcccggcatcggtcatttcgtcgcccgccaggtggcgaatgaagtctgcctcgctgaccagttggaacaagtcaccaatgcgcgccgacaagcgcccctggtgctccgccaaccgtgcgctgtaagtcgccaaccgcgccaccgcgtccgaagtcagcggcgccatgccttcttccgacgtgcgagttttcagcaattgggcgaactgctccaggctttcgtcgaccatcgggatgtcttcgtcgaagtccaccagtacgcggaacatctcctgaaagtccggatcggcatcctgcaaagcgtagtacaactggcgcgaaccgatgatgatcaccttgacctgcaacgggatcatctgcgggttgagcgtcacggtggccaggcggcccagctcgcccagcggcgattccatcttcaacttgcgcgattgcagggagcgcttgagagcgtcccacacgaacggctcgctgagcattttttcggcttcaagaatcaggaaaccgccgttggcacggtgcaacgcgccggggcgcagctggcgataggtggtgtagagcgcgccctggtcggtgctgtattcgatgcggccgaacaggttgtcgtaggtcgggtgcggctcaaacaccaccggtgcgccgccgttgaccggatggccgaccaccaggcttgggcagtactgctcttcgagcagcttgcgcgcctgggcgtcggttttggcgtcgtccaccagttgctcgaccacggtcttgagcaagtacacctgcatggcttgcaggtaaccgcatacgcctgcgttttccgcgtacttttccgacaacggtgcaagcaaaggctgcaaggccagggtgatggtttcttcgttgaactggcgcagttggttgttcgactcacgcttccactgtggcaggctcgccagttcttcgttgaggcgctcttccagctcggaaatatccgtgtggaaccgctcgcggtcggcttccggcagctgcgagaactcagcttcgtccaacgccttgccgtcgagcatcggcgtgaaggcaatgttggagctgtcgcggtacagcgccacatccttttccagggccaggcgttcgatcacgtccagggccttgtcgtagcgctggttgaaggcgcggtcgatggcgctcttgcgctgttgatacgtcgggtgttcgaaggccgccgggaaggtggctgcgaggttgtcgatcaaaccgttgatgtcgttgatgaacgccgccgctgcgccgccgggcaattccagggcgcggggttcgcgaggctcatcgaaattattcacgtagacccaatcagccggggtctgcaggcgtttgccttcggccttcaggtagcgtttgacgaacgaaaagcggccggtgcccggctcgcccatgacaaacacgttgtaaccggggcgcggcatggccacaccgaactgcaacgcttcaaccgcacgttcctggccaagcacaccgcgaaagggctccaaatcattagtggtcgagaagctgaactgttcagcggagaaggggcgagtcagcgcttcgggcgctagacgcaagctggcagcaacaggatcaggcatcgggcttccttacatcaggcggggcagatgacggcattctggctcccggttacgcgctctggcaaggcgcgcctgtgggaaagcatagacacgggatgcgtcccgcaaaaaaatcgcgacatcgcggattgttttataaaaatgcacggaacccttggaacgtgcctaaactccaaactgcgcgggttggactaataactggcccctagggcgctgcgaagcgcctgaacccttgtccattggtttgcacacaaagagaacaaagctatgaaacggatccttctcggtactctcttcaccgtcgtctccctcaatgcaatggcagaagcaccaggtggcccgaactgtggttggggcaacatgttgttcgaaggccagcgcggcactccagctcacttcctggcttccaccaccaacggtacttcgggtaacgccactttcggcatgacctcgggcaccaacggttgcagcaccaacagcgccctgacttacggcggcaaatcgtggattgccatgaatggcatgatgaacgagctgtccgaagacatggccaagggtaatggcgaagcactgaccacctacgccgtggtactgggcgtggcgccggaagatcgcgagcacttcgcggccgtgacccacgagcacttccagcagatcttcagcaaggctgacgtgaccgctgacgacgtgcacaacaacaccattgctgtactgaaaagcgatgcccgtctggcgaaatacgctacccaggcttaagctcgtgcagcccgcgcctgcttaaggcgcgggttttatttttgggcccgcctcccctttgggtctctcttatttccgacttaagttgcccctatgctcaaacgctttgcctggatggcactctttgcctgcgccccgctgtacgcggccccgcatcttgatgatcaacgtttgcagcaattggccaacgatccgttctggctgtccctcggccattatgaagccggcaaaatcagtggctggcgcagctatgtcagcgacaagaaattcttcctcgcacccgatggcgcccaccacccggacgccgagctcaaggccaccgttgacgcgctctacgcgcccgccagcctgggtcaaaagcacgcccaatgcgtttaccccgcacggacccgctggctcaaggatcagttgcacctcactgacctgcctgccgtggactgcaccgaattcaagcaatggttcaaggacgtcgccccgcacagcgcagtgatgatcttcccggcggcctacctcaacagcccgtcgtcgatgtttggccacaccctgctgcgcatcgaccaggccgacgtgcaaagcaacaacaccgccctgctcagctatgcgatcaacttcggcgcctatatcgaaggctccgacaacagcattctctacgcctggaaaggcctgatgggcggctaccctggcctgttcgccctggtgccctatcaggaaaaactctccgaataccgtagccttgagaaccgcgacctttgggaataccgcctcaacctcacccaggtggagaccgagcgcatggtcgagcacgtgtgggaactcaagcagatccagttcgactacttcttcttcgacgaaaactgctcctatcgcctgctggaactgctgcaagtggcgcgtcccggcctgcgcctgaccgaacagtttccactgaccgccatcccgaccgacacagtcaaggccgtcaaggatgcgggcctggtggaaaggatcgactaccgcccgtcccgcgaacgcgagctgttggagcgcgccaagccgctggacagcgacgaacagcaatgggtgttgaaggtcagcgatgaccagaagcagctgcaggagcctgcgttcaaggccatcgcgaaagaccgccaagccctgatcatcgacgccgcctaccgcctcggccgctaccgcgccaatggtctggagcgcgacaccgcgcgctcccagcgcagcttcgaactgctgcgcgcgatcaaccagaaccccgcgcccgacctcaagatcaccccgcccggcctgccggaaaacggccacgaatcgcgcacctggcaagccggcatcggcacccgcggcgacaaggccttcggtgaatacggcctgcgcatggcctaccacgacctcaacgacaacgccgaaggtttccccctcggcgcacagatcgaaatcctgcagatgaaactgcgccagtacgaaggcaaccactggcaactgcagcaactggacctggccaccatccgctccctgaccccacgcaacgccctgttgcagccgtggtcctggcaagtcactgggggccttgaacgcgtgcccggcaaacacgacgacgaaaccctggtcgcccacgtcaacggcggcgccggcggtacctggcagttgagcgacgacatgctcggcttcgccctcggcaccgtgcgcgtggagcacaacaacgacttcagcgaagccatctccccggcagccgggttcaacaccggcgtgctgtggaagaacccactggggaacctgagcctggaagccaagggcgacttcttcaccaatggcgaagtgcgccgcagcatcagcctgaaccaacagtgggaattgtcgcgcaacctcggcctgcgtttgagcgcccaacgcgagtacagccacctgtcgacgccagtgaatgaagtgatgcttgaagtgaagtggtatcactactaacccacgcccagtgaaccagaatgtgggagggggcttgcccccgatagcagtgcatcagtcacgtatccatcgactgacacgccgtcatcggaggcaagcctcctcccacattgggtccgcgtctattcagttccctctaaaaggagccccaccaacatggccgttaactgcaccagcctcgaagaagtccgcacccacatcgaccgcctcgaccagcagatcgtcaccctgctggccgagcgtggcgcctacgtctcccaggccgcgcgcttcaagaaagacacggacagcgtcaaggccccacaacgggtcgaacaagtcatcgccaaggtgcgggagatatcccaggccgtgggtgccaatcccgaggtcacggaacaggtgtatcgcgcgatgattgcggcgtttatccagcaggaattggcgcagcatgctgcgctcacggaaactcgctaagaattacccaaattattcgcctacacagcaaacgcgcaagccatcctcaagcccctgattactaagaaggaaatcttgcggttttttttagcttttttgagtcatcgaaaacttgctccgacgaagcctcgctttatggggatttgtgtctagtctcgggtagcagtcaaattgccaccacgtctatacacggatctgaataggtaagaggcttactatggaatttttcgaaaagctcaccagtctggccgccaaggttcggttgcaaggcccggccattcaaacagaagaagcgaccaaaaatgcttttgtaatgccgtttatcaacacagtgctgggttatgacgtgtttgatccgcaagaagtgacgcctgagtttgtctgcgatgtcgggacgaagaaaggtgaaaaaatcgactacgccatcatgaaagacggcgaagttcagatactcattgaatgcaaaaaaatcggcgagtcactgaacatcaatcatgcctcgcagctatttcggtattttcatgtcaccagcgcaagaatctcaattctcaccaacggtcaggtctatcggttttttactgatctggacgcacctaacaagatggacgaaaagccatttctagagctggacctgctggacattgatgagtattccgtaccggagttgataaagctgacaaagtcagccttcgacgtcgattcaatcattaacgctgcgggagagctgaaatatgtcagccagctcaagaagctgattggcgctcaagtcagcaagccggaagacgacttcgtaaaattcttcgcctcccgcgtttacgaaggcgtgatcacgcagaaagtccgtgagcagtttttcgaactgacacgaaaagccttggctcagtttctgaatgaccaaatcaatgatcgactcaagtcagccatgagcggcgtaattcaaccaacgatagcttcattgactgtcacgaacagcgcgaatacggatcttcaggaacgagacgaatcggaagacaagatcctgacgacgcttgaggaactggagggttatcacatcgtccgcgctgtcgtacgctccgttgtcgatgccaaacgaatcgttcaacgcgatacccagagctattttgggatattactggacgacaacaatcgcaagcctatctgccgtcttcacttcaatcgcagccaaaaataccttgggatattcgacgaggaaaaaaatgaaacccggcacgccatttcatccattgatgagatttacgaatacgcggatcaactgaaaaaaacagtgggttattacgactgaaagccgcaccggaatattttcagccgtcgataaccctgtggtgagcgggcttgccccgctcaccacagaagcaaattcacctcttaagttgcagatgtcatcgcctgggtcaggtcatccactacggctttgcccatctcacacagatagtgcgcggcccaggcgtattgctcgccacgtacatccatcgcagcttccatggcgagtttcttggaataaaaaagcaaagtggaggcgtgctccagcgcttcctcaatgggcatgccggaattgacacgaaacagcggtttttcgttttcgccgtagtcgccgaaagtgacgacgccgagtgtggtgattgcggacaagggtggatcagggacgactttgctcatgatgattgctctcttatgaagtcgagccaccagatcacatcgctaaacatgaagagggtggcagctgtgtgcaggttagcgatccgggtctgagagcaccccgggtagactcaaaggtctcccgcacacagccgccataaaacgctaaaagctgacagatgccagctaatactattgggagcggtgccactcttgaggctcggatcgctaaacccggccgctgatatgcagcgacccaaagaggctaatgatccaaacggtacgtcacaataggccagagattctctaggaaacgtcctgcaatttaaagggaatcgtcattgatggccctttagcccaacacctttctcaccatcctttcacaccgccccaacaaacccctgactagacttcccctatcagccgtgaaacggccagggagtacgccatgtggcggtctgcggtaatgctgtgtgcagtggtgttgttggcgggttgccagtcgacccatcaggagttgttggccaagggttacccaccggcgtttgccgatggttttgatgacggttgcagcagcggtcgccaggcggccggggtgatcagcggggagtttcgcaagaacgtgccgcgttatctcaaggaccgtgaatacgccgagggctgggaggatggttttcgccagtgcaaggccatgcgcgagaacgaagacctgcgcgactacaaggacaatcactgggacgaccgcgaacgcgcctggcagcatgagaaagaccgcgacgccgccagggcctatcgttcgcagtaggtagcggacgcaaagcgtccagggcagcattcccacgcagagcatgggaacgattgcgcggcgatcatggcccaaactccattgagggagaacgtcatgagccgagcttttgtaaacgaggataacgccgccgaccaggccgaccagccggtagagcgccaggtcagtgagcagcccaaccgccttaccgcgcaagggctggcgcagttgcaggccaaggttgcgcagttgcagcacgaatacggcctggagtccgccaaagacgacaagcagcgccaggcggatcttgagcgggatttgcgctacttcaaccagcgggtgcagagcgcccaagtggtggcgcccgcaacgtccaccgacaaggtgcagatcggcagctgggtaaccttcgccaatgagcaggacgaacagcaacgcattcagttggtcggtgaagaccaggccgacgccggcgccggcttgatcaactgggggtcgcccctgggccgcgccttgctgggcgcccaggtcggcgacgaggtgttgtggcaacgccccgtcggcgatcagttgatcgaagtgctgcggatcgagcccgaggcttagacgatgccttgggccagcatggcgtcggcaactttgacgaagcccgcgatgttcgcgcctttgacgtagttgatgcggccgttttcttcgccgtagtgcacgcaggcatggtggatcgactgcatgatgttgtgcagcttgctgtccacttcaccggcgctccacagcaggcgcatggcgttctgtgacatttccaggccactcacggccacgccaccggcattggacgccttgcccggggcgaacaggatgccggcctcgataaagatatccacagcctccaaggtggtcggcatattggcgccttcggccacgcagaggcagccgttgcgcagtagagtacgggcggcctcggcgtcgagttcgttctgggtcgcacagggcagtgcgatatcgcaggccagttcccaaggggttttaccggcgcggaattccaggccgtaacgtgacgccagttcgctgatgcgcccgcgctgcacgtttttcagctccagcagggccgaccattgttcctcggtcaagccgctctcggcgtacagggtgccttcggaatcggacagggaaatcaccttgccgcccaggtccatcaccttgcgcgccgcgtattgcgccacgttgccggaaccggacaccgccacgcgcttgccttcaacccgctggttgttgcgcttgagcatttcttcggcgaaatacacgcagccaaaaccggtggcttccgggcggatcaggctgccgccgtaggtcatgcccttgccggtcagcaccgaggtaaattggttgctcaggcgcttgtactggccgaacaggaagccgatctcacgggcgcccacgccgatatcgccggccggcacgtccacatctgcaccgatatggcgatacagctcgctcatgaaggcctggcagaagcgcatgacttcggcgtcgctcttaccttttggatcaaagtccgagccgcctttgccgccgcccatgggcagcgaagtcagggagttcttgaaggtctgctcaaaggcgaggaatttcagcacgcccaggttgaccgacgggtggaagcgcaggccgcctttgtacgggccgatggcgctgttcatctggatacggaaaccgcgattgacctggaccttgccgtgatcatccacccacgacacccggaaggtaatcgcgcgttccggctcgcagatgcgctccaggatgcccgaggtcaggtagtgggggttggcttcaagaaacggccacaggctgcgtaggacctcttctacagcctggtggaattccggctggtcagggtcgcgtttcttgagacgggcaaggaaggattcgacggattcgatcatgaaaagtctcggcaaattgattgtttttaaatgagattgggccggactttaacaattcatgtcgcaccgcgacagggcaaaatgtcgcctttgtgaatttaaatggtgcattagatgtaaatcacaggccatttctgcccttaaacagggatttcagctcaagcgacgcaccaatagtcacacagctatcgggggcaagccccctcccacatttgaaagccaaaaaaacggagcccgaaggctccgctctttcaaaccaccagcccggatcaggccagttttttgtgccgtacacggtgcggttgagcagctgcttcgcccaggcgcttcttacggtccgcttcgtactcggtgtagttaccttcgaagaacaccgcttgcgagtcgtcttcgtacgccaggatgtgggtcgcgacgcggtcaaggaaccaccgatcgtgagagatcacaatggcggcgcccgggaagtccagcagggcttcttccagagaacgcagggtttcaacgtcgaggtcgttggacggttcgtcgagcagcaggacgttgccgccctctttcagggtcagggccaggtgcaagcgaccgcgctcaccaccggacaggtccttgacgaacttctgctggtcgccgcccttgaagttgaagcgaccgacataggtacgcgacgggatttcatagttgccgatgcggatctggtcggaaccgtcagaaatctgctggaacacggtcttgctgccgtcgaggtcttcacggctctggtccacgcaggccagctgcacggtttcgccgacttcgatggtgcccgaatccggagtttccttgcccatcagcatgcggaacagcgtggatttacccgcaccgttaccgccgattacgccgacgatcgcgccttttggcatggagaacgacatgttgtcgatcagcacgcggtcgccatagcctttggaaacgttcttgaactcgatgaccttgtcacccaggcgcggaccggccgggatgtagatttcgttggtttccgaacgcttctggaattcctgcgattgcatttcttcaaagcgttgcagacgggccttggacttggactggcgggccttggcgcctttgcgcacccactccagttcttccttcatggccttttcgtgggccgattgctgcttggattcggcggccagacggtcggacttggcttccagccaaccggagtagttgccctcgtaagggataccggcgccacggtcgagttcgaggatccagccggcgacgttgtccaggaagtagcggtcgtgcgtgatcgcaaccacggtgcccgggaaatcgtgaaggaagtgttccagccaggcgacggaatcggcgtccaagtggttggtcggttcgtcgagcagcagcatgtcgggggccgacaacagcaggcggcacagggccacgcggcgcttctcaccaccggacaggtgttcgaccttggcgtcccacgccggcaggcgcagcgcgtcggcggcgacttccagctggcgctccaggttatgaccgtcgccggcctgcaggatcgcttcgagcttggcctgttcggcggccagtttgtcgaagtcggcgtccggttcggcgtaggcggcgtagacctcgtccaggcgtgcctgggcgttcttgattacgctgacggcctcttcgaccacttcacgcacggtcttggtcgggtccaggatcggctcttgcggcaggtagccgatattcagatctggcatcgggcgggcttcgccttcgaactcggtgtcgacgccggccatgattttcagcagcgtggatttacccgaaccgttgaggccgagtacgccgatcttggcgcctgggaaaaaggacagcgaaatgtttttcaggatttcccgcttcggggggacaactttgcccagccgatgcatggtgaagacgtattgagccatggagaacctagcgtcagtgactgatgaattaagcggacgaagcccgtgccaggccatgcgcggcgcgggccgttgactatcatcaatgcctgcgtgcggtataaagcctgaatatctggggctggaacgcccccgcgtaaccggcaaagctacctgaatgcgcttggtcagtccagccaggcaagggctggcactttgccacaagtcaaggcatgctagccgccctccgggcgtccggcttatagtgcacgtcgcgcgccagtccagccaaaccgcaggatcacagcttgtccaaagtcacgccgccaactcccctgcgcgccgctcatatagcgccgggagcgcccctgcacggcaccctcaaaggcgcattggcgacgctcgtcctcatgctgctcgcattattgttctggcaactgctggaccaactgcagcaaaaccagaagaaccagcagcaatacaccatcgactacagcgccgacctggctgaacagatcagcctgaacatggccctcagcgcaaagatcgccctgaacctgctgccgatggtcgagccgccgcgtgacagcgaacagcaacaggccttgatgcgtaccttgcaacgttcgttgccggaactgcgcagcatcgccctgcttgcccccagcggcgcaatgatcagtgacagcgccactgatagccaggacagcgcctggctcgaagaactggtgcaacgcagccacggccagtcttattacctgagcaacagcaatgacggcaccctcatctatctcttgttgcaccagcccagtggcggctcacggatgtattgggcgctgcgcctggcgcccaactacctgaccaacctcacccgccaggacggccagggccagcgcccgatgtgggccatcgagaaccgccttaaccatcgcgtggtcagccgtgacagcggcatgccggcgcagtggacctcggcgctgaccccggacgaattgaacaaaagcgtgctggtcacccccctgagcaaaagcgactggcaattgcgcgggctgttcgaccgcagcgccgtgctggagcaactgctgccggccttcatcggtaaatgcctgctgggcctggcgttctcgttgatcccggtgatcgtgctgctcaacatgcgccgccgtcagcgccaggtgcatgaggggcggcggcgctaccaggatattttcgaaggcaccggcgtggccctctgcgtgctggacctgtcggggctgaatgcgttcttcgacaagactcggctggaaacccgcgagcaactgcacgcctggctgcaggacaaccctggcgagcgccagcaactgctcaaggaactgcgcgtcaccgaggtcaaccaggtggcggtcagcctgctgaatgtgggttcctgcgagcaggcctgggagcgcctgatcgatgactgcccacgcaacgctacgtccatcggttaccagattctcgaagccgtcctgacccaacaaagccagttggagctggaaatccagctcaaggacgtggtcggcaacgagcaatacctgtggctagtgatgcgcctgcccgagcagcaggacgatttcaaggcggtgatcctcagcatcagcgatatcaccagccgcaagctgatcgaactgtcgctggtggaacgcgagagtttctggtcggacgtggtgcgcaccgtgcccgaccacctgtatgtgcaggatgtgatcagccagcgcatgattttcagcaaccaccatctgggccacaccctcggctataacaaggccgaactgcagcaaatgggcgagtacttctgggaaatcctgctgcaccccgaagacgccgagcattaccacgacttgcgccagcaacagcgccaggtcggctacaccacccaactgcaatgccagctgcgtttccgtcaccgcaataacgaatggcggcgcttcgatattcgcgaacaagcgctggcgcgggacaagaccgcgcagatcacccgtatcatcggcgtggccaaggacattaccgaccagatcgaagccagcgaatccctgcgcgacagcgaacagcgctaccgcatgctggccgaaagcatcagcgacgtgatctgctccaccgacagccagttggccctcaattacgtcagcccgtcagtcaacgccgtgctcggctatgacgtggattgggtgttcaagaacggctggcagtcgatcatcgccaacccgcagcaactggccggcatttatagcctggtggaacagatcagccgcgcgctgggcgatcccgacgcgctgaacaggctgcgtgatgagatccagacccagctgttcctgttcgactgcctgcgtgccgacggtcgcaaggtgccgatcgaactgcgcctggtgctggtgtgggacgagcacggcgccttcgagggcatcctcggggtgggccgcgatatcagccagcaacgccgcgccgagaaagacctgcgcatggcggccacggtcttcgagcactcaacctcagcgatcctgatcaccgaccccgccggctatatcgtgcaggccaacgaggcgttcagccgggtcagcggctatgcggtcagcgatgtgctcgaccagttgccgaacatgctcaccgtcgacgaacaacaggaagcccacctgcgctatgtgctcaagcagttgcaccagcacagcacctgggaaggcgaagtgtggctaaagcgtcgcaatggcgagcattacccggcgtgggtcggcattactgccgtgttcgacgatgaaggtgacctggccagctatgtatgctttttcagtgacatcagcgagcgcaaggccagcgaacagcgcatccaccgcctggcctactacgacgccctgacccacctgcccaaccgcacgctgttccaggaccgcctgcacaccgcgctgcagtcggcggaacgacagaagtcttgggtggtgttgatgttcctcgacctcgaccgcttcaagccgatcaacgactccctgggccacgccgccggcgaccgcatgctcaaggaaatggccacgcgcctgctgggctgcgtcgccgaagacgacaccgtggcgcgcatgggcggcgatgagttcaccttgctcctgcaaccacgggtcaaccgtgacatggcactcaaccgcgcgattcatgtggccgagcagatcctcgccagcctggtgaaacccttcgtgctggagggtcgtgagttcttcgtgaccgccagtatcggtatcgccctgagcccgcaggacggcaacgaactgagccagttgatgaaaaacgctgacacggcgatgtatcacgccaaggaacgcggcaagaacaacttccagttctaccaggccgacatgaacgccagcgccctggaacgcttggagctggaaagcgatttgcgccatgcgctggaccagaacgaattcgtactctattaccaaccgcagttcagcggcgacggcaaacgcctgaccggcgccgaagccctgctgcgctggcgtcatccgcgccgcggcctggtgccgccgggagacttcatcccggtgctggaagagttgggcctggtggtggatgtgggcgactgggtgatcagtgaggcctgtcgtcagctcaagacctggcaccagaacaaggtgcgggtgccgaaagtctcggtgaacatctcggctcggcaattctccgacggccagttgggtacgcgcatcgccaccatcctcaaggacaccggcctaccgccggcgtgcctggagttggagttgaccgaaagtatcctgatgcgtgaggtcaacgaggccatgcagatcctcgacagcttgaaaaacctgggcctgagcattgcggtcgacgacttcggcaccggttactcgtcgctcaactacctcaagcagttccccatcgacgtgctgaagatcgaccgtaccttcgtcgacggcctgccttctggcgaacaggacgcgcagatcgcccgcgccattatcgccatggcccacagcctgaacctggcggtaatcgccgagggtgtggaaacccatgagcagctggatttcctgcgtgagcatggctgtgatgaagtgcaggggtatctgtttggacggccgatgccggcgaaccggttcgaggcgcagttcagcaatgatgcgctgttcatgttcgactgaaattctgcggtgaaaccactggcctcatcgggggcaagccccctcccacattatgatctgcgaacacattcaactgtgggagggggcttgcccccgatcaggcactcgcagccaccgcctatccccagatgagctccacttgtccgcgacatgatgtcctttcatatgccatctaaaacccattgggttagaatgccctccttttctgcccccgatccttgaggaccgccatgttcagccgtgatttgactattgccaagtacgacgccgatctcttcgccgccatggagcaagaagccgtgcgccaggaagagcacattgagctgatcgcttcggaaaactacaccagccctgcggtgatggaggctcaaggctcggttctgaccaacaagtacgccgaaggctacccaggcaagcgctactacggtggttgtgagtacgtcgacgtggttgagcaactggccatcgaccgtgcaaaagaactgttcggcgccgactacgccaacgtccagccacacgccggttcccaagccaacagcgccgtgtacctggccctgctgcaaggcggcgacaccatcctgggcatgagcctggcccacggcggtcacctgacccacggcgccagcgtttcctcctccggcaagctgtacaacgccgttcaatacggtatcgatgccaacggcctgatcgactacgacgaagtcgagcgcctggcggttgaacacaagccaaaaatgatcgtggccggtttctctgcctactcgcagatcctggacttcccacgcttccgcgctattgctgacaaagtcggtgcctatctttttgttgatatggcccacgttgccggtctggtcgccgctggcgtctacccgaacccggtgcctttcgctgacgtcgtgaccactaccacccacaagaccctgcgcggtccacgtggcggcctgatcctggctcgcgccaacgccgacatcgagaagaagctgaactccgctgtcttcccaggcgcccagggtggcccgctggagcacgtgatcgccgccaaagcgatctgcttcaaggaagcgctgcagcctgagttcaagacctaccagcaacaagtggtcaagaacgcccaggccatggccagcgtgttcatcgagcgcggctttgacgtagtgtctggcggtaccgagaaccacctgttcctgctgtcgctgatcaagcaggacatttctggtaaagatgctgacgctgccctgggcaaagccttcatcaccgtgaacaagaactccgtgccgaacgacccacgttcgccgttcgtcacctccggcctgcgcttcggcaccccggctgtgaccactcgcggcttcaaggaagcagagtgcaaggaactggctggctggatctgcgacatcctggcagacctgaacaacgaagccgtgatcgacgcggtacgtgagaaggtcaaggccatctgcaagaagctgccggtgtacggcgcttgattgcagttgcttgaataagaagcccggctgaagagccgggcttttttatgccaattccagtttgaaatacagttaattgtgggagggggcttgcccccgatagcagtgtgtcagtcacagagttatctactgacacaccctcatcgggggcaagccccctcccacatttgattgtgtttcaagtcagggttggtagaccttggcaaaaccttcgcgaattttgtcttcgggcaactcatcggcaatgaacacgatcacactctctcgcacctcgccttcggcccattcggtatcccaatcgaaaccgtagagtttcagcacgccctgaaacaccatgcgccggtcttccccggcaatgttcagcacgcccttgtagcgcagcagttgcttgccgtggtcttccagcagttcgttcatgaactcactgagtcggtcgatatccagcggctggtcggtgcgcagcaccagactggagatacggtcgatggacggcgcggcgcgcaccgggcgcaggctcatgcccgcgttgaggttgaagccgcgcacatcgagcagttcggctaaatcaatcttgccgtgctcgaccacgcgaatcggcgcacggcggttgatgcgggtcaggcgttcgctgagtgcgtcgaaggtggcgtcgtccaccaggtcgcgcttgctcaccagcaggcggtcggcaaagccgatctgggcctgggcgatggtctgggtcaggtggtgctcggcgtgggccgcgtccaccagggtgatgatgccgtcgaggatgtagcgctcacgcaattcctcgtcgatgaaaaaggtctgggccaccggcgccgggtcggccaggccggtgcactcgatcaccagacggtcgaaggcgatctcgccgctgtccaggcgctcgagcagcaggtacagggctttggtcaggtcggtgtggatggtgcagcacacgcagccgttggacagggtcatgacttgcaccggctctgcgcccaacagctgggtgtcgataccggcgtcgctgaattcgttttcgatcacggcgattttcaggccgtgctcggctctgagcaggtggcgcagcaaggtggtcttgccggcgccgaggaagccgctgaggacggtgaccgggatgggagaggacaaaatattctccttgaaggaacacagaaacaaatgtgggagggggcttgccccctcccacaggggagttgcgttaactcaacagcacttgggcccacccttgccgccgtaacgggcttcctggcgttcccggaagaacgccttgtagtccatcaccggcttgtccgggtgtttggtttgcatatgctcgacgtaggtgtcgtagtcgggcatgccgaccatcaggcgcgcggcctgaccgaggtatttaccgaggcgactgatgtcattgaacatggttgcaaccctcgattacgcgtccggtacggcctggaacggggcttctttatccgtacgttctttgttgccccaggcggcgacgccaaccttgagcgcatagaacaggatgctgaacaccacgaacaggaacagcgccgtcagcgttgcgttggtgtaggcgttgtagatcacgtgctgcatctggtcgatgctcttggccggggccaggatctggccgttggccaatgcatcgctgtatttcttcgccagcgacaggaagccgatcgccgggttggcgtcgaacagcttgatgaagcccgcggtggtggtgcagatcagcagccagacggccggcagcatggtcacccagatgtagcgttggcgcttcattttgatcagcacaacggtagccagcatcagcgcgatacccgccagcatctggttggagataccgaacagcggccacaaggtgttgatgccgcccagtgggtcgatcacgccctggtacagcaggtaaccccacatcgccacgcagcctgccgttgcaatgaggttggcggtccacgactcggtgcgtttcagcgccggcacgaaagagcccagcaggtcctgcagcatgaaacgaccggcacgggtgcccgcatccaccgccgtcaggatgaacagcgcttcaaacaggatcgcaaagtggtaccagaacgccatggtgttttcacccggaagtacgctgtgcaggatctgtgcgataccgaccgccagggtcggtgcaccgccggcacgggccaggatggtggtctcaccgatgtcacgggccacggcttgcagcgcctcaggcgtgatcgcaaaaccccagctgctgacggtttgcgccacggcaaccacatcaccaccgaccacggcggccgggctgttcatggcgaaatacacgcccggttcgatcaccgaagcggcaaccatcgccatgatggccacgaacgactccatcaacatgccgccgtaaccgatataacgggcgttggtttcgttatccagcagcttgggcgtggtgcccgaagagatcagcgcgtggaaacccgagaccgcgccacaggcgatggtaatgaacaggaacgggaacaggccgcccttccacaccgggccggtgccgtcgatgaactgggtcagggccggcattttcagctcgggcatggtgaccaggatgccgatcgccagggcgatgatggtgccgattttcaggaaagtggagaggtagtcacgcggtgccaggatcagccacaccggcaggacggcggcgacgaaaccgtagccgatcagcatccaggtaatttgaatgccggtgaaggtgaacgctttggcccagaccggatcagcggcaatctgcccgcccagccagatcgaacccagcagcaacagcacgccgatgatcgaaatttcaccgatgcggcccgggcggatgtagcgcatgtagatgcccatgaacatcgcgatcgggatggtcgccatcaccgtgaagatgccccatgggctctcggccagggccttgaccacgatcagcgccagcaccgcgaggatgatgatcatgatcaggaagcagccgaacagcgcgatggtccccgggatgcggcccatctcttcgcgaaccatgtcccccagggaacggccattgcgacgggtggacaggaacaggaccatgaagtcctgcaccgcaccggccagcaccacgccggcaatcagccagagcgtgccgggcagataacccatttgcgccgccagtaccgggccgaccagcgggcctgcaccggcaatcgccgcaaagtggtgaccgaacaggatgtgtttgttggtcggcacatagtccagaccatcgttgttgagcactgcgggggtggcccgccgtggatcgagctgcatcacattattagcgatgaacagactgtagtagcggtacgcaaccagatagatggccacagcagcgaccacaatccacaaggcgttgatcgcctcgccgcggcgcaaggccactacgcccagggcgcacgctcctacgattgccagcaccagccagggtaggtggcgtagcaggctattattatttttcatttttgtattccagccagggtggacagaaaggacagccatccggagtttagcgctactggacttaaaggccacccccctacgttggtctagagccttctgcggacaaaaaaagcagaaaacccgggccaataatgacgcacggctacaatccccctatccccggagggtttcaccatgaccgagcaaccgtctgaccgccgtcgtttccgccgcatcgcctttgatgccaagaccgaaattcggcaaaacggccgcgaatggccagtgcaattggtggatttgtcgttaaagggcctgctggtgcaacggccggaagactggaagggcaacaaggcgctgccgttcgacgtcgacatccgcctggatcccaaggcgcatataaagatgcaagtgcgactgacccatgaggatcctgggcaactgggttttgtgtgtcagcacatcgacctggactcgatcagccacttgcggcggctgatcgagttgaacctgggtgacgaggatgagctgcaccgagagttggccgccttgctggaagtgtgacgactcagggaaatgccgtacgcgccgggaagtcgctttccgactcccagaagccggctttctgagtcgacgcagcctgccagaggccatcggcaaaacggtaggtggtgtaacgggtggcgaagtcttcgtccccatcaccgtccatgaaggacgacacttgcagcaattcatccgccccacccgcggttggcgtcgccgcctgccaggcggccttgcctgtctgggccagggtcagtggcttgatcttgccgtcggtgcctttgtagtccatcggtttgagttgttgcttggcgggcattaacaactgcgtggccgggccgctatagctacccatcggcgcggtctggtcgatgaccaggaaatacaccgtctccggcaagcccttgagcggggctttcttgacctcggccaacgggtaaccgaggtcttcatgggcgatcacgtcgccggaggccgacactaaccggacctgggcttccaacaacggtttttccaccaggtcgccgggctcgtcgaacgaatcttcgtccaacccgttgccccaactgtccttgtgcaactgagcgctgatgcgttggtcttcgagcacctgtagaacgctgccgtcatccgttgccagcttttgcgccagacgatatccggcgggcaactcggcccacgccaaagcgggcaacccggccaaggcgacaaacagggcgactgcgccccagcatttcgatggttgcatggcattcatccctgatttattcgaacagtgcatccagcgcctgctccaggcgcgtgaccccaataatttttatgcctggcggcgactctttcggcgcattgcccttgggcacgattgcgcgtttgaagccatgcttggccgcttctttcaaccgttcctgaccactcggtaccgggcgcacttcgcccgacaggccgacctcgccaaacaccagcaggtcgtgaggcagcggtttattgcgcaagctcgacatgaccgccgccatcaacgccaggtcggacgccgtctccagcaccttgaccccgcccaccacgttgaggaacacatcctggtcatgggtcggaatgccgccatgccggtgcaataccgccagcaacattgccaaccggttctgatccaggcccagggtcacgcggcgcgggttggccaggtggctgtcatcgaccaacgcctgcacttccaccagcatcgggcgggtgccttcccacgttgccatcaccacactgcccgggacttcttcctgggcacgcgtcagaaagatcgccgacggattggagacctctttcagtccccggtcggtcatggcgaacacgcccaattcgtttaccgccccgaagcggttcttcaccgcccgcagcaaacgcaggcggccatccgattcaccttcgaaatacagcacggtgtcgaccatatgctccagcacccgaggcccggccagcgcgccttctttggtgacgtggccgaccaggaagatcgccgtgccgctctgcttggcataccgcaccagcagcgccgcgctctcgcgcacctgggacacgccgcccggcgccgattgcaactgctcggtgaaaatggtctggatcgagtcgatcaccatgaccttgggtttttcaatacgggccgtggcaatgatgctttcgatgcaggtttcggtcatgacccgcagctgatcctggggcaaccccaggcggcgggcgcgcatggccacttgttgctgggattcctcgccggtgacatacagcgccggcatgcggctggcgatgctgcacagggtttgcagcaaaatcgtcgatttgccgatgcccgggtcaccgccgatcagcaccaccgagccgtccaccaggccgccgcccagcacgcggtccaactcgccggatgccgtggaaaatcgcgggatttcttccacgctgacttcagccagggtcttgatctgcgcctgctgcccggtccagccggcgcgaccggtgggggccgccgcaccgccactctcaatcatggtttcagtcagggtgttccacgcaccacactcggagcactggccggcccacttgggaaaggtcgcgccgcactccgtgcagccgtacatgcgcttggcctttgccatttgagaacctccaaccgaaaaaccgcgatgatagctcagcgcgacgccggggtccggatttcaccactggccaagcgtgaagcggtgttaccgaccgggtcttcggcattgagatcggcacctttggccttgagttcatccagcagctcgacacgcttgaacagcccggcgtacatggcggcggtctgtccggcaccgttgcgctggtcggggttgcagtcggtggccaacaggcgctgggcgattttcagctcgcctttgaagatcgcgcccatcagcgcggtgttgccgcgtttgtcctgcacgcaggcgtcggcaccggcgttgagcaagcgctccacgaacggcccctggccgtggtaggcggcgaggatcagcgcggtgtagcccttgtcgtcctgggtgttgaggctataaccggcgtcgatgaaggtgttgagcatgtccaggtcaccacggcgggcggcgtcgaagtagtagtcctgcaactgggccttgagcgctaccgggtcgggagtctcggcatgggcgacaaaggccagcatggtcatcagcaagccgatagaaattcgcatggtttttctcctgccaggggtcgacgcccgtatcggggcgtcgaccgtaaccaacggatcagtcggtcagtttttccgccagcgccttcacgcgcgccaggtcacccttggccaccttggccacgccggtgccgtattccgggtcggctttgtaaaggaacgacaggatgatgtgcttgctctcgtcatcggtggtcgccagcgagccaccgaagttttcgatcaagtcctgacgctctttcttgctgtaggagcggtacaagtcacctgcctgcttgaagttctgctcacgctggatcttcgcctgctgggtgctgcctgacagcgccgactggctgtagcgcgcggtttgcggttcttcccgtggcaacaggcggcttggctggtagttcacaccggtggtggtcttgccgaagttcatcgcgccgtcctggttgccgttgttgacggtcacccgtggcgcgttgatcggcagttgcagggcgttggcgcccaggcggtacatctgggtatcggcgtaggagaacacccggccttgcagcaggcgatcttccgacggctcgatgcccggcaccaggttggccggggccatggccacttgctcggtttcctggaagacgttggccgggttgcggttcagcaccatctgtccgaccttgcgctcgggcacattcggccagatcttggtggcgtccagcgggtcgaaatcgaacttggccaggtcttcaggcttgagcacctgcacgtacaggtcccacttggggaagtcgcccttgttgatgtgggtgaccaggtcgttggtcatgtggctgtagtcgcggccctgcacttcgatgacctgcttgggatcgaggttcttgatgccttgcaggctcttccagtggaacttgacgtagtgcacttcacccttggcgttgatcagcttgtaggcgtgcacgccgttgccgtccatctcccggtaactggccggagtgccagagtcggagtacagctcggtcagcgtacgggtggcttcgggcacgtgggagaagaagtcgaagcgacgcgagtcgtcatccaggttggtacgcgggtccggcttgaacgcgtggaccatgtccgggaacttgatggcatcgcggatgaagaacgtcgggaagttattgcctaccaaatcccaattgccttcggccgtatagaacttggtggcgaaaccgcgtgggtcacgcagggtttccggggagtggttgccgtggaccacggcggagaagcgcacgaacaccggcgtcgcctcgccggccgcaaagaccttggccttggtcaggtcgctaaggccgtcagtgacggtgaaggtgccatgagcgccggtgccacgcgcgtgtacgacgcgctcggggatgcgctcgcgatcgaaacgctgcaatttctgaataagctgcacgtcctggagcagtaccgggccattggcgccggcggtttgcgagttctggttgtcgccgacggcggcaccgttgtcgcgggtcaggttggcggcgtgtaccgacagggagagcaggctggcggtcaccagtaccagcgcggatcgcgctgtaacgggcccacggctcattgggttgttcatcgaggtttcctctggtttttttagtgcacattcagttgtgcttgccagaggctagtgacccgcgagtcagaagataaatagaaaagccgtaccaacccgatagataaaataatctggtaagtcgctgatttggcgagtatttcgcgcgcgattgatggcactttgcaaactatttgcgttttaatgtgtcgataaaagctaacagtgttaacggttgtttcaggcaagccctctacgactgacttacactgggtaccacccttctcatctgtaacaaggaataacctatgggcgtgatcagtgagttcaaggccttcgcggtcaaaggtaatgtggtcgacatggccgtcggtattatcatcggcgccgccttcggcaaaattgtttcctcgtttgtaggcgatgtggttatgccgcccattggtctgttgatcgggggcgttgacttcggtgacctggcgataacgctcaaggccgcccaaggcgatgtgcctgcggtggtcctggcatacggcaagttcatccagagcgtcatcgactttgtgatcgtcgcgtttgcgattttcatgggtgtgaaggcaatcaaccgcctcaagcgtgaagaggccgtggcaccaagcctgccgccgacgccgaccaaggaagaagtgttgctgggtgagatccgcgatctgctcaaggcacagaacgacaagccgctctaatcgagccggcacgaaaaaggcgcctggtgtgaggcgccttttttattaccagtagttttccaccgccacctggccaggtcgacggctcaagctcaggttcatatcgcgctgcttgaacaactggcgtgtgtcatcgaccatctgcgggttgccacagatcagcacgcgggaatgctccggggtcagttcgacgcccgccgcgcgttccaactcgccattttcgatcagcgtggtaatgcggccgttcaacgcaccggggtgttgttcgcgggtgacgatggggatgtaggtgaacttgtgcgcgtattcggccaggtactcgcgttcgcccaacgtgttgatcagcgcttggtaagccaactctttggcttcgcgtgcgctgtacaccaggatgatgcgttcgaatttctcccagacctcgaagtcctgcaggatcgacaaaaacggcgccaccccggtgccggtgcccagcatccaaagatctcggccgtcgacgaaacggttcaaggtcaggaaccccgtggcctggcgctccaccatcaaggtatcgcccacacgcagacggctcagttcgctggtgaactcaccgtccgggacgacaatcgagaagaagtccaggtgctcatcaaacggcgaggacaccagggaatacgcacgccataccgtgctgccatccgccttggtgacccccaggcgcacaaactggcccgcggtaaaacgaaagcccgggtcgcgggtggtgcgcaaggtaaacaggctgggggtcagcgattgcacgtcgagcaaggtctggcgggtaaatttctcagcactggccgtcatggggggctccgttctacaggtgccctagtgtcgctcaaagtcacgtgcggaaacacctacgataggtagtggcatcacgcaagcacacagtgatggcaaattaatttcaccttcgatcaattcgctattagctataaaaactacctcatatagccgctgttagtgggttgttacaggggcttcaaccccctaataagtcgcgggtttcaaacttgccacttgcttggctaactaccttcctgtggaaaaattcttaaaccttacagcgcaagaacgaaattttcctctcgccatgtagtacgtgtcctacactgattttcgtgcaacgttggggataaaggacgtaccccaagtcacggagatcccatggagatttacccatgcttaactggcgaaatacacgactccactcgctcgaaggtgaggacgaggtcaccagcgtattcgaaatgaccatcaacaaggcctacgaactcggtttccaatactgttccttcaagatgagctctcaactcaccaacggtcaaaacaaaccggtggaactgacgaactatccaattgaatggaaaaatctatacaaccaagcgcactacttcgatgtagaccccgtagtgaaacattgtagggagggcgtgttaccccttgtctggaaggaggaaacattcaaagacgtgcccagtctttggtctttggccgctaccttggaggtacacaaggcgttgactatcagcgtgcatgatttccggggggtcttcagcatgctgacgttgagccgtggcaagggtgacatcagcccggaagaattgtatgaaaaagcaggaatggcgctatggctctgccacgccatgcatgccgtgctggcgcagaagtttgccgaaaaacccagcgtcaaccctgcaagcaaattgacccctagggaaacggaagtccttatgtggtctggcatgggcaagaccgcagcagatatcgccgccatcctttgtttgtccgagcgtacgataggctttcatatgaacagtagcttcaagaaactgggcgtcaacaacaaaatcgccgccgtgcttcgcgccgctcgggccggcatcatttaaaacactccatgtaatccccttgaaaaaaacgtaacatttaccgcccattctgagtgctgagcagccccttccggggagtcgcccgtggttcactcagacggttcggcaaccgctgtcgaacacccatcgtttacccagagtctcccccgccatgcccctgctcgaaagcccctttgcccagctcgatctgatccgccagccagagcaacacaacgatccgctgcaagccttcgatgccgccgacgagtacctgctcagccatttggccgaacagcagccggccgcacacacccgggtgctggtgctcaatgacagcttcggcgcccttgccgccagccttcagggccgggtgcaggtcacctcaagtggcgactcgttcctggcggcacaaggcctggaaaaaaacctggtgcgcaacggcaaggcgtttgacgctgttccgttcatcccggccagccacctccccaccgggccgttcgaccgggtgctgatccgcgtacccaaaaccctcgcgctgctggaagaacaactgatccgcttgcaaggccaactggccccaggcgccgaagtgatcgccggggcaatgatcaagcatttgccacgggcggcgggcgagttgctggagcgttacattggcccgatgcacgcatcgctcgcggtaaaaaaagcacgcctgctgatcgccaccgcgcaagaccgccccgttgccgtctcgccctaccccacccgctacgccctcgacgcaccggctatcgagttgctgaaccacgccaacgtgttctgccgtgaaagcctggacatcggtacccgcgcgttcctgccccacctgccgaaaaacctgggcagcgcccgcgtggcggacctggggtgcggcaacggcgtactggcgattgccagcgccctgcacaaccccgaagcacactacaccttggtggacgagtcctacatggccgtgcagtcggcgctggagaactggcaagccgccctcggtgaacgtgatgtggtggtgcgtgccgccgacggcctggccgggcaagagccacaatccctggacgtggtgctgtgcaacccaccgttccaccagcagcaggtggtcggtgatttcctcgcctggcgcatgttccagcaggcacgggaagcactggtggtgggcggcgccctctatatagtcggcaaccgacatttgggttatcacaccaagctggcacgcctgttccggggtgtcgagcaagtcgccaccacgccgaagttcgtgatcctcaaggcgcgcaaataaaaaaaccctgcttctctcgcaaaaagcagggctggaaagccgggccgcaaagcccggatcgggatgtcagtgggtggtcaggccggccgcattcataaacatgcgcatcaggctggccacgacgaacagggccagcacactgccagtccagatcatcgccagccaccccaggcgccgccacaatggctgcttctcggcctgttcaatctcgtgcaacgaaggtttgccggacatggaacgaccctcctagtgataaccgtcttcgtgggtgaccttgccgcggaacacgtaatagctccagaaggtatagcccaggatgaacgggataatgaacagcgtacccaccagcatgaagccctggctttgcggcggcgcggcagcatcccaaattgagactgacggcgggatgatgttcggccacaggctgatgcccaaaccgctgtagcccaggaagatcagcaccagcgtcagcaggaatggcgtgtagtgtgcgttacgtgccaccgcgcggatcaacccgtacatggtcaccagcaccaggatcggcactggcaggaaccagaacaggtttggcagggtgaaccagcgcgaggcgatttccgggtgcgtcagcggcgtccagatactcacgatgccgatcaccgccagcaccacgaaggccaatggccgcgccaggttgtgcattttctcctgcaacgagccttcggtcttcatgatcagccaggtgcagccgagcaacgcataagccacgatcagcgccacgccgcagaacatcgtgaacggcgtgagccagtccagcgaaccgccggcaaactggcgattcaccactggaatgccatcgatgaacgcacccagcgccacgccctggaagaacgttgccgccagcgagccgccaatgaatgccttgtcccacaggtgacgcttgtggtccttggccttgaagcggaattcgaaggctacaccgcggaagatcagcccgatcagcatcaggatcagcggcaggtacagcgccgacagcaccaccgaataggccagcgggaacgcaccgaacaacgccgcgccgcccagtaccagccaggtttcgttaccgtcccagaccggggccacggtgttcatcatcacatcacgatcggtcttgcccgggataaacggaaacaggatgccgatacccaggtcgaaaccgtccatgaccacgtacatcatgatgccgaagatgatgatcacggcccagatcagcggaagatcaatacccatctcaatgccccttgtgctggatgtgggtgtggtcgtcatcgctgccatcatcggcggcggacaacggacgggccggcgtacgtttctggccagggccaccgtgggtgggctcgctgccttcgtgggtctgaggccctttgcgcaccaggcgcatcatataacccaggcccgcaccgaacagcgcgaagtacaccaccacgaacaacaccagggtgatggtcatctgcgccaggctatgcccggaggacgcgtccgccgtgcgcatcaagccatagaccacccacggctggcggccgatctcggtggtgaaccaacccgcaagaatcgcgatcaggccggacggccccatccacaacgccaggtacaggaacggcttggacgtgtacatcttgtcgccccggcgcagccagaggctgaataggccagtgaagatcatcaggaagcccaggccgaccatgacccggaacgaccagaatacgatggtcgagttggggcggtcttccggtggaaactccttgagcgccggcacctgtttgtccagggagtgggtgagaatcaggctgcccaggtaggggatttctaccgcgaacttggttttctcggccttcatgtcgggccagccgaacaggatcaacggcgtcggttcgttaccgatgttttcccagtggccttcaatcgcggcaattttcgccggttggtgcttcagggtgttgaggccatggaaatcaccgatcaccgcctggatgggcgcaacgatcagggccatccacattgccatcgagagcatcttgcggatcgccgggttgtccttgccgcgcagcaagtgccaggccgccgaggaaccgacaaagaacgcagtggccacgaaggctgccgtggccatgtgcgccaggcgatacgggaacgacgggttgaagaccacggcgaaccagtcggtcgggatcacccggccatcgatgatttcaaagccctggggcgtctgcatccagctgttggaggagaggatccagaacgtggaaatcagcgtacccacggccaccatcacggtggagaaaaagtgcaggttgcgcccgaccttgttccagccgaacagcatcacgccgaggaaaccggcttcgaggaagaaggccgtgagcacttcgtacgtaagcagcgggccggtgacggcgccggcgaagtccgagaagcggctccagttggtgccgaactggtaggccatgaccaaaccggacaccacgcccatgccgaagttgacggcgaagatcttcgaccagaagtggtagaggtcacggtaggtgtcgttgtgggtcttgagccacaagccttccagcaccgcgaggtaactggccaggccgatggtgatcgccgggaacaggatgtggaaagagatggtgaacgcaaattgaattcgggcgagatcgagcgcctccaaaccgaacatatgtcttcctctgtcaggtaataccggctgctggcgggagcctgcacccactgcccccacggatatggagcctggcgaatttcgattcgtttctttttttagccaaccacgtagggaatctggccctgaggccgccaggccgatgcccgggcgggcattgatctggatcaagcattgctgaaagagtagtcccattttcaagattgaactgtgtggtcttttgccgcgtgacagactgcctcagctcagttgttgcaactatctgttacaacttaatgataatctcggtgctccctccggccttgacctgaactccccgatgcctagtgaacccgcgttgctgttgcgtcaccaccgccctttcatcgcgttctggctggcgcgtatcttcaccgccagcggcttccagatgctcaccgtggccatcggctggaacctctaccaactgaccggcaatgtgctggatctggggttggtcggcctggtggagttcgtacctcgcgtgctgttcatgttgcacaccgggcacgtggccgaccgctatgagcggcgcaaggttgccgccatctgccagaccgtgcaggcgctgattgccctgagcctggccatcggcggcctgaccggcaacgtgacccgtgagatgatctttattctcgcctttctgctgggtgctgcgcgctcctttgaaatgccgaccacccaggcgttgctgccaagtattgtgcccagcgccttgttcccgcgagccgtggcctcatcgcagtcggcccagcaattggcgaccatcgtcgcgccggccctcggcggtttgctctatgcgttcggcagcgtgtgggtgtatggcccaacggtggtcctgtacctcattgcctgcgtgctgaccctcaacctgcccgcccgccagacgccgttgaacaaaggcaaggccaccctggattcgctgctggccggcatccgttttatccgcagccgcccggacatcctcggcgccatctccctcgacctgttcgctgtgctgctgggcggcgcgaccgcgttgctgccggtgttcgccaaggacatcctgctgaccggcgcctggggcctgggcctgctgcgctcggcgccggcggtgggcgcgttgttgatgtcattgtggctggcgcggttctcggtggaccgccatgtgggccgcgttatgttcactgcggtaggcgtgttcggcgtggcgaccatcgccttcggcctgtccacctccttctggttttccctggcggtgctggtggtgctgggggcggcggatatgatcagcatggtcatccgtgcgtcgtttgtgcagttggaaaccccggatgacatgcgcggccgcgtcagtgcggtcaatggcctgtttatcggcgcatccaaccagttgggtgagttcgaatccggcattaccgcccactggttcggcaccgtgcccgccgtggtcatgggcgggatcggtacgctggtggtgacgggcgtgtggatcaagctgttcccgaccctggcgaatcgggatcgcatgcacgtaccggtggaagagcctattcaaaaaaccagcgtataacccatgtgggagggggcttgcccccgatagcgccatgtcagtcacagcatcgttgactgacaccctccatcgggggcaagccccctcccacacttggataatcagtgctggctagaccgtgtcagagcaccttatcgagggtgatgggaaattcccgcacccgtttgccggtggcgtgataaatcgcgttcgccaccgccgccgcaacaccgacaatgccgatctcccccacgcccttggacccgagggcgttgacgatctcgtcatgttcctcgacaaacaccacgtcgatctcgccaatgtccgcgttcaccgggatatggtattcggccaggctgtggttcatgaagcgccccaactgatgatcggtctgggtttcttcatgcagggccatgccgatgccccacaccaccccgccaagaatctggctgcgggccatcttggggttgaccacgcgcccggcggcaatcgcactgaccacccggcggaccttgatggtgcccaggtcctcatccacctgcacctcgacgaagacggccgaatgggtggcggtgctgtagccctcgcgttttttgtcgggctcgctgtcgacctgcacttccaacgcgtcttcgccactgtccttgaccaactgcgccaacgacacactcacgtcaccggtgtgcaagtggccgtcttcaaagcgtacggattctgcctgcgtgaagaccgggtatgtctgccgggcaatggccagcagtttgccggtcaacgcttcgcaggcttgctgcaccgccgtccccaccgaggacacggtaaacgaaccgccctgcagtggcgcggtgggcagtgaggaatcgcccaacaaaaaggtcacgtcgtcgaccgccacgccactggcctgcgccgcaatctgggtcatcaccgtgtaagtgccggtgccaatatcggtggtggcgctgctgaccgtcagtttgccctgcgcgtcgatccgcgccttggcactggccttcatctgcatggcttcccacaccccgccggccatgccccagccgatcaactggcggccgtcgcgcatgctgcgcggttccgggttgcgctggctccagccgaaacgctcggcaccttcgcggtagcactcgcgcagggccttgcttgaccagggtttgtcttcgttctggttgcgctcggcgtagttgatcaatcgcagttgcaccgggtcgatccccagggcgcaggccagttcatccatggcgcactccaggccaatcaccccgagggcagcgccaggcgcacgcatgtccaggggcgtgaacacgtccaggggcaccaggttgtaggtcagttgcacgttgtcgcagtgatagagcatgccgctccactccaccacatgttcgctgaaatcctcgaagcgcgaggtctggccgatagcggtgtggcccagcgcgagcaaacgaccgtcggcggccgcgcccatttgcaaacgctgcagggtgcgcgggcggtagccgaaggtaaacatctgttggcgagtcagggtaacgcgtaccgagcgtttgagcgccagggacgccatcaccgccagcggcaattggtactgcgggcgcaaaccggagccaaacgcaccgccgacgaacgcggcaaagatgcgcacctggcttttatccaggccgaagactttttgcacataggcctggcagttctgcgggccctgggtcttgtcatggatatgcagggtgccgtccggctgatacagcacggtgctggcgtgcggctccatcgggttgtgatgttcgacgggcgtgctgtagtgcaggtccaggctgacggcggcgccgctccactcggcctggaagttgccgcgcggcttgggcggggtttgcggcgaggcataggcctgttcctgcatggccagcaggtcggtttcgaaggcttcggttgcgtactcgatctccaccagggagccggcatgccgcgccaattcgaggttgtcggcgatcaccaaggccaggggttggccgctgtacagcacacggtcgttgtacagcgggcggaacggcgagccgtcggccgcgtcgtcgtcctggaaagcgtcgtcgtagctggcgattcttggccggttgaggtgatcaattaccgccaccacccccggcagcgccaacgccctggaagcgtcgatacgcagcacccggcccttggcgacggtgctggacaccacgctgccatgcagcaagccatcctcgggaaactcaccggcgtaacgcgcctggccggtgaccttgagcagaccgtcgacccggtccaagggtttgccgatggcagtcatgggcgttctcctgcgacagcggcatcactcagggcacgaatgatgccccggcgcgccagcttgattttgaagccgttgtgcgccaggggttcggcgtcttgcagcagggcgtcggcggcttggctgaaggtttcgcggctgacgacctggccgatcagcccggcttccaccgcgcggtcacgccagggtttgtgggccacgccgccaagcgccaggcgtgcgtcgacgatgacgtcaccgtccagctcaagggctgcggctacagataccaaggcgaaggcgtaagaggcgcggtcgcgaatcttcaggtagttgctatggcttgccaggttgtcggcaggcagttcgatggcggtgatcaactcatcgtcggccagcaggttgtcgcgttgcggcgtgtcgccgggcaaacggtggaagtcggcgaactcaatgatccgcgcaccgccacggccctcgacatgtacccgcgccgccaatgccgccagggcgacacacatgtccgaagggtgggtagcaacgcactgctcactcgcccccaggatcgcatggattcggttcaagccggtgcgcgccggacagccgctgccgggctcgcgcttgttgcacggcaccgtggcgtcatagaagtagtagcaacgggtgcgttgcagcaggttgccgccagtactggccatattgcgcagctgcggcgaggcaccggcgaggatggcctgggagagcaacgggtaacgctgttcgatcagcgggtgccaggccaagtcggcattgctcaccagggcgccgatcaacagtcctccgtcggtcgtctcctgaatgtcatgcaacggcaggccggtgatatcgatgaggtgctcagggcggctgatgttttctttcatcaggtccagcaggttggtgcccccggcgataaagcgcgatgcagcgctgctgaggtgcacggcctcctgtacaccggtcggccggctgtaatggaaggggttcatggtttgccctccaggacttcctcgatagcatcgcggatattgctgtaggcgccacagcggcacaggttgccgctcatcaattcctggatttgcgcggtgtcatgggcgcggccttcgttggccaggcccacggcggaacagatctggccgggggtgcagtagccgcattggaaggcgtcatgcttgataaacgcctgctgcatcgggtgcagttggtcgccgtcggccaggccttcgatggtggtcagctcggcgccgtcgcacatcaccgccagggtcaggcaggcattgatccgcttgccatcgcgcaacactgtgcaggcgccgcattggccgtggtcgcagccttttttgctgccgacaaggtcgagttgctcgcgcagcaggtcgagcagtgtggtccagggcaacacatccagttggcgatcctggccgttgaggctcaggcgtatcgagtgactgacgaacggttgggccgccgcgccattgggggttgcgctcataaacacctcacgggttggtggacatccgcggcgttcagggaagtcgccgtctcaggggtacgacttcccggggtaatgagcgttcaaggtgattgatcagcggatattgagcaatgtcgtcagggtgttctgcggagggttgatcgaggagttgctgtattggaaccagccctgggcctccacgttcaggtcaaacacatagatgtagcccatcagcgtgccggccccgttgcaggcctcgctgatgttgcccacctggcagaccgccgtgcgctgcccattgagctctgcgccatcaaagcggcctatggggttgttgcccaggccgacctccatgaccgacactttggtaggcccacggtgcgtgcacatctgcgtgctttgtgcgcgctccgggatggtttccgtgcacgccgccgattcaaccttgaacacccgcacttcgctcaacggcggtgcagtcgcgccccaggccggtgctgcgccgagcaacaggctgatacaggggatcagggctagactccacgggctggcgtttttcatgttgcagatgaccttcgtttaaacgtcggcgcagtatgcctcaaggcctcggctgctggtatgatgcgccgctttttccgatcctctctgaaaccaaaggcgcttggcgcagtttgtgctttgacttagaggtcaacaaatcacgacgccacagagcgtcacagggagcaggcatgctggaaaagctgtttcaactcaaggcacacaacaccaacgtgcgcaccgagatcctcgcgggcatcacgacattcctggccatggcctacatcctgttcgtgaacccgagcatcctcggcgagaccggcatggacaagggcgcggtgttcgtcgcgacctgcctggcggccgccatcggttcgaccgtgatgggcctgatcgccaactacccgatcgccctcgcgccgggcatgggcctcaatgccttcttcacctacaccgtggtgctgcacatgggccatacctggcaggtggcgctgggtgcggtgtttatttcggcggtgttgttcttcctgctgtcgatcttccgtatccgtgaatggatcatcaacgccatccccctgcccctgcgctcggcgattgccgccggtatcggcctgttcctggccttgatcgccctgcacaacgccgggatcgtggtcagcaaccccgccaccatggtgggcctgggcgacttgaaacaaccggcaccgattctcgccaccctcggttttgtgctgatcgttgccctggaagccttggccgtgcgcggcgcggtgttgatcggcattctcgcggtgaccatcgtttccatcctgctgggcgttacgccctttggcggcgtgacgtcgatgccaccgtccctggccccgaccttcctgcaactggatatcaagggcgcgctggatatcggcctggtcagcgtgattttcgccttcctgttcgtcgacctgttcgataactccggcaccctgatcggcgtggccaagcgtgccggcctgatgggcaaggatggccacatgccgaaaatgggccgtgcgctgatcgctgacagcaccgccgccatggccggttccctgctcggcacctcgaccaccaccagctacatcgaatcggctgcgggtgtgagcgccggtggccgtaccggcttgactgccatcgtggtcgcgatcctgttcctgctggcgttgttcttctcgccactggccgccagcgtcccagccttcgccaccgcgccggccctgctgttcgtggcggtgctgatgacccagggcctggccgaaatcgactgggacgacattaccgttgcagcgccggtggtgatcaccgccctggcgatgcctttcacctactccatcgccaacggcatcgccttcggtttcatcgcctggaccgccatcaagctgctttcgggccgctatcgtgagctgaacccggcgctggtgattctgtcgattctgtttgtgatcaagctgggctggttcaacgcatgacttttgacgccgcacgctacaccgctcaactgcaagacaaggtcacacgcttgcgtgacctgctggcaccgttcgacgcgcccgagccgcaggtcttcgactcgccgctgcagcacttccgcctgcgcgcggagttccgcctgtggcgcgaaggcggtgagcgccactatgcgatgttctcccaggacgacaagcgcacgccgatcctgatcgaagagttccccatcgccagccagcgcatcaaccagttgatgccgcagctcaaggccgcctggcaagccagcgccgccctgagccacaagctgttccaggtggagttcctcaccaccctggccggcgatgcgatgatcaccctgtgctatcaccgcccgctggacgagcactggcacaccgccgccaaccagctggctgccgacttgaatgtcagcatcatcggccgttccaagggcaagcgcgatgtgatcggccatgactacgtggtggaaaaactcgacgtcggcggccgcaccttcagctaccgccagcccgaaggcgccttcacccagcccaacggcacggtgaaccagaagatgctcaactgggcctatgaagccttgggcgatcgcccggatgatctgctggaactgtactgcggcaacggcaacttcaccctgcccctggcgacgcgcgtgcgcaacgtgctggccaccgagatcagcaagacctcggtgaatgcggcgctgagcaacctcgatgaaaacgcggtgggtaacgtcaccctggtccgcctctccgccgaagaactcaccgaagccctcaacgaagtgcgcccgttccgccgcctgcacggcatcgacctgaaaagctatgaattcggcagcgtgttcgtcgacccgccgcgcgctggcatggacccggacacctgcgaactgacccggcgcttcgacaacatcctgtacatctcctgcaacccggagacgttggccgcgaacattgcgcaactgcatgacacgcacacgattacgaaatgcgcgatgtttgatcagtttccgtggacgcaccatatggaatccggggtgttattgactcggcggtaactcggcgtcctccggttgcttcttgcgcggccgcccgcccttcttgccattggcacgggcggcagcggctttggcggcgctgcttttgcgaccgttgcgcgaggcaaccaggctgatcgccaggtccatcaggggtttgctggtggcaatcaggccagtgatcgaaacgtccaggtcttgggcctcacagcacagcgcctttccgccaaagccgacctccagttgctcgaagtcctccagggaaaaccccgcgaactcgggcaggccagccaccggcagtacaacgcgactgccgtcgctgaagccgatggaaatgcagttgtcttcataacgcacagcgctggcgcgggcataaaggtgccgcgtcttgcgccctcgggctatcgccttttcaacgtcggcctcagtgagtggtttatagggtacaaccttggcttttacgattttcatagatcaatccccacgcagtctggtgcccttaccagattcaaaattgtccgttgcgctacgacatcgtgccgagcacttgcgatgacatggactccacgccgaataaccaaccctggcaccaactcaccggcgtcccaatcccaggaatgattctccagacagaccgtttgcaggtattcccaccagatcctgcgtgcccgtgccaagtagtgccgctgcatgatcgccccgcgtatttctttcaaaaccgccaggggtggctgcctccgctcaggctctacgtcccacaactccacgtccccatccagaaaactgaaacgaaaacgcgcatcccattccttgccccgcacatgcacatggggcgggcaatgctcatccctgatgaacaccgaaatcacatatcccttgtaaacgcctactctcatcgtaacccatccgttaggttattttccgccaggtaacaattttcccctgccacccgacaaccggcttcatctacccgaagctgtttcacagactagtaagcacaaaaaacccggcgaaggccgggttgtaaccactcatgccgagggctggaaatactccgccaacgcccgcagatcctgctcgctcagcaaccccgcgtaatacttcagctgaatcctcgccagcagatatgcatgccgcgcattcgccaggtcgcggcgggcagtgaacagttgttgctcggcgtcgagcacgtcgaggttgacccgctcaccgccggcaacactcttctttgtcgcagcgaccaacgccgtggcagagctgaccgccatttcataggcacgcactttggctgcgccgctggtgttgaggttgaactgcttgcgcaactccaccagcgtggccgaggtttgcgcgtccagttcatattgggcctgggacagttgattagccgcctggcgcgtggacgccgacacgccaccaccggcatacagcggcaggctgacctggatgccgaccgtattggtgtcgtacttctggttgtagctgctctccgagtcggagttggtctggcggctcgtggcgtacaagctgaccttgggcaggtgcccggcgcgtttgcgttccacttcataggaggccacgtccagggcgtggtgctgggattggagttccgggttgttggccatggccagttcgcgccaggtttcaaaacggttgggctccagcggcgggatctcgaattggcgcgtcagcggcgccagttcttcgatctgcaacggttggccgacgatggcttccaactcgcgcagggcactgtcctgggtatcctgggattcgatctcttcggcctgggccaggctcagccgcgcctgggtttccagcacatcggtacgggtgccttcgccgcctttgagcaggcgatcattgagttgcaggcgctcggcatacgcacgtttctgcgcgcggctcagctcgatacgctcctgggccagcaaggcctggctgtaggcgttgagcacccgcaccgccagttcctggctcttgccacgaaaacgctcatcagccatcaaggcctgggcggtgccctggcgaaagcgcgcgtaggcctcgtaatccagcagcggttgttgcaaggtcagggtcgacgcgtaactgcggtagtcacggtcactggtgacatcacccgccgtcacttcggattcgttgcgcgagttgttgtagctccacgataggttcggcaacagcgccgcgcggccgatcacgcggttttcttcaccggcttcacgcgcctggatcgcggcctgaaaggtcgggtcattgcgcagggccagatcgtaggcatccagtaaccccaaggcgtgcgccgaggtacaccccaaacacaagataaacagcagcgccttcattcttccaccagcgccatgtgggtgcgatccatcaacggtttgaacaggtagttgagcatcgagcgctccccggtcttgacgaaggtttccaccggcatgcccggacggatctgcacgccgtccagttgctgcatgcccgccgcgctgacctgggcacgcagcgtgtaatagggctcgtcggtgcgctcatcgacctggcggtccgccgaaaccagggtcacctcaccggccacccgtggcgtggtggattggttgaacgccgagaacatcaactccaccggcaagcccggatgcactttgtcgaccatctgcaccggcacccgagcttctaccagcagcggctcgccctggggcacgatgtccatcaacgcctggccgggcttgatcaccccaccttcggtgtacacgtccagccccaccaccaccccggacgccggcgctcgcaccaggctgttggccagttcgaactcggccgaagccaggcgattgcgcaggtcgtcgctgcgggtgcgggtctcggccaactggccgcgcaggtctttctggaagtcttcgccaagctggcggatgcgcagacgcagttcctgcacctggcgctgcaattggccgatgcggccgtagtcttcggcgatggcgccgtcgatctgggaatacaggcgctcgctgtcgagcaggcggttgcgcgggatgtaaccgtcacgcgccaactcgcgcaggccttgcagttgctcattcaacgcggcccgttgctggactttgctcgcctgcgaatcccgcgtgccgcgcaactgggcctcggcgccggcgatggtttcgcgcaggccttgttgctcggtggccagtgcctgggcacggctatggaacagttgccgttgcaggctcagcgtgccggtcgcctcaggatcgttgagcagttccgggccgaaggtgatcgccgccagcccttagctttcggcacttaaacgcgcttcgctggccagggatgccaggtactggctgcgcagggactgcatctgcccgcgcaacggggtttccttcaagcgcagcagcacctggccagcgttgaccacatcaccgtcgcgcacctcgatacgttccacgatccccccggccggatgctgcaccgtcttgcgatggcccgaaaccatgaccttgcccggcaccgccacgcccttgtccagtggcgcccacgctgcccagccgaggaacccggcaaagccgccgagcaccaacagccaacccaaacgcgaatattttttatcatccagcgccagcacattgttcggcgcatcactgatcagcacgggtttgctctggttcatgcctgttttccttcaccgaggcggtaactcatgctcagggtcgacaccggtttgctcgccgccggtgtctgccgtgcctccaacacccgtgccgtcgacccgaaggcctgcaattggccgtccttgaggatcagcaaccggtcagtcagggtcagcacgttgggcttgtgggtgatcaggatcaccgtgcggcgctgttgcttgagctgggcgatggcttggagcagggcttgttcgccgacttcatcgaggttggcgttgggctcgtccagcacgatcaacgcaggcaggccgtacagcgcacgcgccagggcgacccgctgtttctggccaccggacaatccagcaccaccctcacccaatggcgtgtcgtagcccaggggcagttgcagaatcagctcatgcacgccggccatttgcgcggcggcaagcactttgtccgcctcgacctcggcaaaccgtgcaatgttttgcgcgatgctgccggcgaacaactggatgtcctgcggcaggtagccgatgtgcgggcccaactgctgtttgtcccacagggccaggtcggcaccgtccagccgcaccttgccggccaagggtgcccaggcgcccaccagtatccgggccagggtggacttgccgcagcccgacggcccaatcacccccagcacctcgcccgccgccaggctgaagcccaaattggccagcgccggtcgacggctgccgggggcacaggcgctgatttgctcgacgctcagttgccctttgggcaccggcaagctcatgcgttcgggccgtgccgggttggcctccagcatctgtgacaaacgctcaaaggccaggcgcgccgagccccactgcttccacacgccgatcaactggtcgatggggctgagcacgcggcccatgaggatcgaaccggcaatcatcattcccggcgtgatggcgccctgcaccgcgagcaacgcgcccaggcccagtaccagcgactgcaacgccaggcgcacgcccttggaccaggcggtgacggtcgcggtcttttcactggccaggttctgctgcgccaggaacgcttggtgctggccgaaccaacgcgcgcgcaacgtggcgagcatgcccatggcttcgatggtgtcggcattgcgcaggttggccgtggcctgctggctggcgctgatcgacagttggctggccagggccatcggcgcctggctgacgtgatggttgacccacgccagcacgatcagcagcaccgcaccgaccagcgccaacagcccgagccaggggtggaacaggaagatcaccagcaggtacaccggaaaccacggcgcatcgaaaaacgcgaacaacgcctggccggtggcgaactggcgcagggtggtcaggtcatgcagcgcctgcccggccgcctgggtaccgcccttgagttgcgcttcgaacgcggcgtcatacacccgctggttcaggcgcatgtccatctgcgtgccgaggcggatcaccacctggctgcgcacccactccaacgcgcccatcaggccgaacaggccgaggatcatcagcgtcagcatgagcagggtcatctgattgcccgaggccagcacccggtcgtacacctgcagcatgtacagcgccggggcgagcatcagcaggttgatcaccgccgagaacaggccgatgttgaagaagccacttttataggccgtgagggcggccagggtttcgttgccggcgtggcgcatctggggattctcaaagggttgagcgggcagcgccgtcgcgttgacaggcggtacgacgctgcgcagaattcggcaccgccgtcgctgaagaaatagaaggcttgggcgacggcggtgtgtcatgcggcgaatgggagagcgatcttccattcgcttttttgcttaagcggccagggcgaagtcctgaggcacgtcttgcacgcccaccagggccacatcggaggcggcgacagcagccgagtccacatgggccacaccggctgcggccagttggtcgaacgtcgagttgatcgacaggcttgggtcgatgtccttgagcagggagtcgatcgccgacgccagtgccgagctgtcgccgctcatcaggccgtagatgatcttgtgcacctggccatcgcggccttcggcctgcaggctcgacaggcccaggttggcgaagctgacttcctgctcagcgagggcgtagctaccgccggcagcgccgccggtgaggaccgtgcccaggttcagcgagtcgatcgaaccccacaaggtgtgcgacggcgggttgaacaaggtgtaatgcaggtcgccgttggccaccaccgccgcgttgctgacagtgctcgacacgccatattgggtaccgtcgaacgggccaggattgaaaccaccggtgttcgaaccctctttgaccgacccttcacggtggttcaggtcaccaaagtaagccgaccagtcgctcaggtactcggcaacggtgttagcggcgtaggcggtgctgtatgaaatagaaatgctcatgcaaaactccaagtcatggggtggtatctccgcagcaagccagtgcctgctgtggttttgcccgtcactgggcaaaatcggtcagaactgatattcaacggtgccctgcaacgtgcgcccacgccccagggtgaaggccaatacgtcgcccagtggcaccaggtaggcgcggtcggtgacgttttccatggccaggcgcagggtcaactgctcggtggcgcggtagctgctgtacaggtcgtagacggtgtagggtttccagtcggccggatagacaccggtttgcgaggtggtcacgccggcgccacctttgacgtagtaaccgccgctgtagcgggcacgaacccccacatccaacgtgcgctcgaagaagcgtgcgcccagcgtcgcggtgccacggtccatcggcatgtgttcggaggagcccaggatcgcgctgcagctctgccccgcattggccacgtcgtccggcaccatcgcgtctaccggcgcccggctgcccggccctttctggatcttggtgacgccacccagccacgcggtcttgctgcagaacgtattactgccgagcatgcgcgtgtagttgaactggccgtaggcaaacccggcgtcgtaatccagctgatactcaaggccgcgaaaacgcgtggtttccaggttgttcacatacgccgcattaccgatgttggcgatgccataaccgggcggctgcacccccagggccatataggaaaagtcatccacgcgggtgttgaagtaggagaccttcatgcccacgcggtcctcggcgaacagcaggtcttccttcagcacgttgaagccgacctcccaggccgtggacgtctcgggcttcaagtaagggttggggaaaatcgattccgaaccgccgccatgtggccggccgctgaccagcgattcggtgacggccggcgggcgccagcccttgccgtacgtggcaaacaattgcagccaatccacgccgggcttgaccgacaggccaaaggtcggcgagaaatgcccttcctcccgatccacgtcataggtcatgggcaagccgacctgccgagttgtgccgataatgaaggtacgggtattcaggccggtttcaccgcgcagccgatagcggtcgtaacgcaacccggcattgaggttcagccagttgtcgtagtcgtagtccaggcgcgcgaacaggctgcccattgcccgatcacccttgggcgtgatgctttccgccgccgaggccgtcaccgccgaatcggcggccaccatctggttggagtccggccggaccttgtcgtagaaaaactccaggccgtagttggctttgatcaccgacagctcgctcaaggcgaaggtcgaaatattctgcgcctgcacaccataggtgttggtctgataggtgacgtcgtagcccttgctgctgccacgggtcagcgtgctttggtcattgcgggtgtcgacgtagtagagcttggccttgaaatcgatcagcgggttgtccggcgtgtagctgtagtccaacgcgaagttctgcgccgtgacgttgctgctgccgagcttttcccagagctgggctttttcggcggtcatcatgttgacgtcgtcgtagtcgacttcggtggtcaggtagctcagttgcaggcgctgatccaccggcaggttcagacccagcttgagcaggcgcgagcgcatcaccgagccggtgtactcgacggtggagtttttgatccggtcttcactggccggcaggaaggaactgccggtgcgcaactcgccgatgctgccccgggtgccgggtttgtagtcaccgagatgacgctcactggcggccaccagcatgtcccacacatcggtgcccacggcaaacgccgaactgccgataaaatgcgtgccgttgctgcgcccgcccaacccggtggtcaaacggatgcgcccaccgatttccttgccgcccttgagcaggtcggcggcttccacggtgcgaaaattggccaccccgccgatcaccccagcgccacccatcgtcgaagtagcgcccttctcaatcacaacttccgacagcaattccgggtcgacatacagcgtgccattgcgttgctggtgaccactttgctggtagttctggcgcatgccgtccactgacatgttgacccggccgtagtcctggataccgcgaatgttcaccgacaggccagggtcttgctggctgaccgccgagtagacacccggcgcctcttcgagcatctcggcggcatgccgtggtgggttgcgatccagttgctcacgcccgaccacactcaccgagcgtggcgatgaatacacccagtcgttggggtgcaggccggtaatcgtggtggtcgccagcgccagcgcggcgccgctctgctccacgcgggtcagggtgacttggcgctcgccattgaagcgatactccaccggcgcattccccagcagacgcgccaacccttcctgcacgccgtattgccccttcaccgccgtgctctgcaaaccggccaggcgctggctgtcgaacagcacttgcaggccggcctggtcggcgaatgccagcacggcactgcccaggggttgcgcggggatatccagcatcagcaccgcaggttgcgccgcattcgcctgagactgagcagcgaatactggagccactgcggcgaacaggcccaagtggatggccagggctaaccggcttgcggtgatacgccccttgttgagtgctgacatttctgtggttccctgcgttgagcgttttcttgtttatgcgaatgcttctcacctagcaagacgtgcgacgcgcaggaagtcagtaaggttttttgaaagtttttcaggaagggggatttcaggcggtgggagcaggcccccaccgggtcatcaatagatcaggctgaggcctgccaggtccaagcgttgcacttgcagttcctgggtgagcgtgtcgagagcggtgtcgagcatgtcgaggcggaacacaccgctgacttcacgatcgcccaatgccgagtcgatcaacaccacgcgcccggggcggtagcggttgagctgttcgatgacgttggccaacggctggcgatcaaagatcaacacaccgcgtcgccaactggtggcgcgcgctacgtcgagctggtccaaagggacgatgccttcctgagtgctgtagcgtacggcctggccttctttgaccactctgtcggccggaccttttttcgggacagcttgcagcgtgacctcgacactgtgctccaacacgccggtccacgcctggctatcgccctcgcgctccaccacaaaccgcgtgcccagcgcccgggtttgtcccccggcgctctgcaccacgaacggtcgggtttcttcgcccaccctcggtgccacatcaaagatcgccgagccttgcagcaggctgattcggcgttgcacaccgtcgtaatccaggcgaatggcactgccggaatccagctcgaccttgctgccatcggccaggtgcacggtgcgcacttcgcctttttcggtgatgtagtcggcctgcatgcgcagcaacaggtccggcccacgcccccagccgacaccggctaccaccacgaccagcgcaacggcagccgcacgctgccatggccggcgccgcctggtcccgcgcacaggctgcgtcgccgccgacgggcgctggcggttcaccggcggctccttgtacacctcgcccagtgccgcccaggtctgttcggcaaagcgcaatgccgcttcgtggcggctgtcgcaggcgatccaatgccgcaactcggcctgctcctgttcggtcagggcaccggcgtgcaggcgcaccgcccactcggcggcctcctcggtaatgctgtgctgttgcggaccctggctattcacgtgtgaatctcgaatttttcgttatataacgctgtgacgagtgaacgggcgtttttcggtaattcattcgtcggatggcgccctctcgccttcctgcaagcgctgcatcacgtaggccaacgctttggccagatgcttttgtactgagctgtcagagatgtccaggtgccgggcgacctgggcgtgggtcatgccttcgatgcggttgagacggaaaatctgctgggtgcgttccggcaattccgccagtgcctgcttcaatgcctgtcgctgttgctgcgccattgcctgagcctccaacccggccacgtcatcttcaatctcggccagcgcctcatggggcacggagtctgtcttgcgccgcgcttcctggcgaatatggtcgatcagcagattgctcgccgttcgatagagatagccctgggagttgtcgatgcgctcgccggccggcttttccgccaggcgcaggaagctctcctgcaccaggtctgcggccaattgcgggtcccgtaccttgcgcgccagatacccgcgcagggtatcggcatgcttgagaaacaggcctttgagatccacgtccgacaaaccgactccctggaatgttaaggaaacaggcgggcatcttaagcgttgtcgagaatgattttcaattgatatctaatctgatccggcggtatgaaaggcctgattaacagttcggtaatcgaacacatccgctgcgatcaattgaccaaattaaccaaccagtacattttatccccacaacgaacaataactgtggagagacgccccatgccgcctatcgtgctggtgctcaacggccccaacctcaacctgctcggcactcgcgagcccgccacctacggccatgaaaccctggctgatgttgctgctttgtgcggccgaagcgctgaacagttgggcctgaaaatcgaattccgccagaccaaccatgaaggcgaactgctcgactggatccacggcgcccgcgcccgctgcgccggtatcgtgatcaacccggcggcctggacccacacctcggtggcgattcgtgacgcgctggtggccagtgaagtgccggtgatcgaagtgcacctctccaacgtgcacgcccgtgaagcattccgtcatcactcctttgtctcgcccatcgccaaggccgtgctcgcgggtttcggcagccatggctaccacctggcactggaacacttcagccagttgctcaaaggatcggcccgatgaaaccgcgcattctcgccggcctgatcggcgccggtatccaggcctcccgtacgcccgcgctgcatgaacacgaaggcgatgcccaaggcttgcgctacctgtaccgcctgatcgaccttgaaccccggcacctggatatcgacgccctgcccgatctgctgcgcgccgccgaactcacaggctttacagggctgaatattacctacccgtgcaagcaggcgatcctgccgttgctcgatgaactgtccgacgaggcccgtggcatcggcgcggtcaatacggtggtgttcaaggacggcaaacgcatcggccacaacaccgattgcctgggatttgccgaagggtttcggcgcaacttgagtgacgtcgcccgccaacacgtggtgcagatgggcgccggcggcgcaggtgcggcggtagcccatgcgctgctggccgagggggtgcaacagttgagtattttcgacgtggaccccgcccgcgcccgcgaccttgtggataacctcacgctacgtttcgggccgggccgtgcccaagtgggcaataacgtgaaaaacgccgtggccgaggccgatggcctggtgaacaccacgccgatgggcatggccaaactgcccggcacaccagtgcccgccgcctttttacgggccgaactgtgggtggcggaaatcgtgtacttcccgctggaaaccgaactgctgcgcgatgcccgtgccctgggttgccgcaccctggatggcggcaacatggcggtgtttcaggcggtgaaggcgtttgagttgttcagtggggaagtgccggatgcgcagcggatgctggcgcacttccagagcatgaatacctgactgagttggaataaaaatccaaatgtgggagggggcttgcccccgatagcggtggatcagccagcttatctgtagctgacccactgtcatcggggggcaagccccctcccacattttgaatgcattccaacctgaaacttcaggcctggaggtaacgcatcaccgaatcacaaatcatgtcccgatgccgctgtttaaccacctcatccgacaggtcgatctgaaaaatctcactgaaggtatggcggttggacacccggtaaaagctgaatgagttgatcagaaggtgcacgtccagcggctccagcccttcgcggaacaagcccagctcggcgccacggcgcaaggtttcccccagcccttcaaggatcttgctgttcatcgccttgatggtgtctgtgcgcttcacgtactcggcattgtggatattttcgatgctgacaatgcgcacgaaatccacgttctggtcatggtgatcaaaggtgaactccaccagccgccggatcgcttcacgcggttccagggccgtgaggttcatgcgcgtttcggtgttgcggatgtcgccgtagagtttctccagcacctcgacgtacaactgctccttgctgccgaagtagtagtagatcatgcgcttggaggtgtggatgcgttcggcgatcgcgtccacgcgagcgccggaaaggccctgctggacaaactcgacgatggcttcctggagtatgttttcgcgggtcttttccggattgttcttacgactcttgcgaggtgcctcggtggtcatggtgcgctcacggccagtgttatgcaggccgtgattatgggccgcgatgccccccgaaagaaagcacccgggccgccgttataaacgcgcctggcgcaccgcgccgctgcgcgatttggccatggccgccaggcgcaccgccacgttggccgcgccgtagccggcataaccgttcttgcgctggatgatctcgaagaaaaaccgcccttcgaagggttcggtgtacacgtgaaacagctcaccgccttgggcgtcacggtcgtacagcacgttgtagtacgccagctcactgaggaattcatcgtcgaaatcgaaacgcgccgccaggtcgtcgtaatagttgagcgggatatccagcagcggcaccccggcctccttggcgcggcgcacttcggcgaagatgtccgcgcagtcgaaggcaatatggtgcacgcccgagccacgatagctcgacagcgcatgggaaatcgcggtgttgcggttctcagagatgttcagcggcaggcggatcgagctgcaacggctgcgcagcgcgcggcttttcaccaggccgtaagggtcgggcagcaccacttcgtcatcggcttcgaaatccagcaggctcttgtagaacagcacccaactgtcgaggctatcggccggcaaggccatggccatgtggtcgatgcgcagcaagccgccgctggaggacgcggcgggctgcaggttgaagtcggtgtcgtagagcccgccttcgctctgatccaccaggtaaatcaggctgccatccggcgcacgcaccgccgccagctccagctcattcggcccgaccaggccgcgatacggctggcctttgtacgccaccgcccgctccagcgccttggcgctgtccctgacccgaatcgcggtggcacacagcgacggcccatgggcttcgaaaaagttgtgggcaaacgaatagggttcgcagttgaggatcaggttgatatcgccctggcgcaacaggcttacgctcttggagcgatgctgcccggccttgacgaaccccaggcgttccaaccagtgggtcagcttggcgccaaggctctcgtccacggcgaattcgaggaactcgatgccgtcgtattcgctggccggcggggtatcaaacagaatctccaccggttgcgccggtgcttgctgtttcaggcgttcgcgggttttctcttccaggtacagcaaggagcgcaggccatccgccgcgttcgcacgggtgggcgcggcgcggaagccgtcgttgaaaatttccagggacagcggcccggtgtagccgctcttgatgatcggcgcaaggaaccctgccaggtcgaattcgccttggccggggaagcagcggaaatgccggctccactccagcacgtccatggccaggatcggcgcgtcggccatttgcacgaaaaagatcttgtcgccgggaatctcggcgatggcgctcgggtcgcccttgagggacagggtgtggaagctgtcgagcaagacgccaaggctcggatgatcgacctgacgtaccaagttccacacctgttgccaggtgttcacatgcttgccccaggccagcgcttcataaccgatgcgcaaaccacggcggccggcatgttcggcgagcaggccaaggtcatcgagcaaaatgcgctcgtcgcccacgcaatcggccgaggcattgctgcacacaagcaccaggtcggtgcccagttcctgcatcaagtcgaatttgcgttcggcacgttccaggttgcgggccaggcggtcacggcggcagccttcaaagtcgcgaaacggctggaacaaggtgatggcaatgcccaggtcggcacacatttgcctaacttcgcgggggctgccgtcgtaatacaacaggtcgttttcgaagatttctacaccgtcgaacccggcggccgcgatggcttcgagtttctccggcagggttccgctcaaggaaacggtggcaatagagcgttgcatgggcgactcccggcatttaaggcgcgtcttatttacggcaaattattggccgctaaactgttcacagcaattaaaatgtacgaaccggttagtttttggtgcgattatcgaacacaaagccgttttggcgaattgacgattttttagccactgcgcaccatcgattcagtaacaagacccagaacacaccataaaaatttcaaaaaacgggtacgacctcatgcctctgcaaaactccgtcctggccgaccgcccggacaccccgcacgccggcatcggcgacaagatccgcggcgccctggccgtgggtaaaacgcgctggggcatgttggccctggtgttcttcgccaccaccctcaactacatcgaccgcgccgcattgggcgtgatgcagcctatcctcgccaaggagatgagctggacggcgatggactacgccaacatcaacttctggttccaggtcggctacgccatcggctttgtgctgcaggggcgcttgatcgaccgggtcggcgtgaaacgcgtgtttttctgcgcggtcctgttgtggagcctggccaccggcgcccacggcctggccacctcggcggtgggcttcatggtctgtcgtttcattctcgggctgaccgaagccgccaactacccggcctgcgtcaagaccacacgcctgtggttcccggccggcgaacgggcagtggccaccggtatcttcaacgccggcaccaacgttggcgcgatgatgacgccgatgctgctgccgttgatcctgcacgtgtggggctggcaggcggcgttcctgtgcatgtcggcactcggcgggatctggctgctgttctggggcttgaaatacttcaacccggaagaccatcccaccgttaaacagtccgaactggactacgtgcagcaggaagtcgaaccagaacaaccccgcgtgcccttcagccgcatcctgcgcatgcgtggtacctgggccttcgccctcgcctactcgctgaccgcgccggtgttctggttctacctgtattggctgccgccgttcctgaaccagcaatacaacctgggcatcaacgtgacccagatgggtatcccgctgatcatcatctacctgaccgccgacttcggcagcgtggggggtgggatcctgtcgtcgttcctgatcggccgtggcatgaactcgatcaaggcgcggctgctgtcgatgctgctgtttgcctgctgcatcgtcggcgtgatcatggcggccggctccagccagctgtgggtcgcggtgtttgccatctccctggcaattggcgcgcatcaagcctggaccgccaacatctggagcctggtgatggactacacgcccaagcacatgatgagcacagtgttcggttttggtggcatgtgcgcggccatcggcggcatgttcatgacccagatcgtcggccacatcctcacggtcacgaacaacaactacaccgtgttgttcaccctgatcccagcgatgtacttcattgcgctgacctggatgtacttcatggcaccgcgcaagatccctaccgtagacgtttgatctatcgtctcagctaccggcgccgctgctgccaggcagcggccagcccgctcatgcagatcaccccgataccgaccaccgtggtcaggtccggggtgtggttgaacaccagccagcccaacaaccccgcgaacacgatctgacaatagccgaacggcgccagcaaggccggtgccgcgaagcggaacgcctgggtcagcatcaagtgcgcggtcatgccgcaggtgcccagggccagcatcaacaccccatgccacagcgtcggcacctgccagaagaacggcaccatcgcactcatcaccagggtattgcacaggcctgcgaagaagttgctggtggtgggcgtgtcgtattggctgaggatgcgcgtgagcagttggtagaagcagaagaacagcgctgaacacaggggcagcaagaccgccggggtgaacagttcgccaccggggtggatgatgatcagcacccctacaaacccgcagatcaccgccagccactggccacgcgtcacatgctcgccgagcagcggcaccgagagcgccgtcaccaggatcggtgcgaggaagttcaccgccgtggcttccgccagggggatgaagtgcagcgccgaggtgaaaaacaggctggtgcccaacaggcataacgcccgcaccacctgcatccccggccgtttgctgcgcagcacgcgcaaacccgattgcggcaggaaaataccggccatcaacaaggtgtgcaccaggtaacgcgcccacaccaccatcacgatcgggtaaaacccggccaggtatttggacaaggcgtcatggctggagaacaggaacgtcgccagtacaatcagcaaaatgcctttgaaggggtgattgacgccggaaaggggggtgctgacagtcatggaattctcttgcgtggcgagctgaacgcgtggcactcaacccggtaatctagcagccgggcctgcgtctgcccctagagcataaccaaacaccgtgcgaacagcgcactaaatcaccggattcgagtccaacgctgcacgttgactgccgtgttgcacactttttaatcaaggccttgccgctatgaaaaaaatcctctttgttctgtctgcccttgccctgctcaccgcatgcaaccagcaagaggcgccagcccccaagccggccccggcgtccgtacaagccacactggtgccggcaacgccgcccaccgacaaatgggtcggcaagtggatcggcgtcgaaggcctctacctcaccatcgccaaggacgacagtatcggccgtggtcactacatcctgaccatgaagtacggccttgatgacgacgactcgggcaccttcaaaggtgaagccaacgaagacggcatcgcctttacccgtccggacggcccgcagcaactgagcgccggcgacggcgaagccaccggtttgaaatggttggcggataaaaaggattgcttgatcgtcgataccggcgaagggtattgccgctaataacggccatactcaacccacatccctgtaggaccgttcatcaaagaggattgccccatgctatggaaaaaaggccgacgcagcgacaacgtggtcgacgcccgcgatgacagcggcggcggtgggggcggtatgcgctttgggggcggcaagggcctgagcctcacggcgatcgtgctgatcgtcggcatcggctggctgaccggccaggacccgatgcagatcctcggccagttgaccggccagctggaacaggcaccgtcagtgagcacgcagacgcgccaggcgccgccggccaacgatgagcaggcggattttgtccgtgccgtcctgggcgacaccgaagacacctggggccaggtgttccaggaaaacggcttggcctacaagaacccgaaactgatcctgttccgtggccgggtcaattccgcctgcgggggtgccacctccgccagcggcccgttctattgcccggctgaccagcaggtgtacctggacctggatttcttccgggaaatgtcgcagcgcttccaggccgccggtgatttcgcccaggcctacgtgatcgcccacgaagtcgggcaccacgtgcagaccttgctgggcatctcgtcgaagatccaggcggcacgccagcaaggccggcagatgcaaggcgatggcggcctgctggtgcgccaggaactgcaggccgactgcttcgccggggtgtgggccaaccgtgcgcaaaagcgcctcaactggctggagcccggcgacattgaagaagcactgaacgcggccaacgccattggcgatgaccgtttgcagcaacagggtcaggggcgcgttgtgccagactcgtttacccacggcacctcggcacagcgggttcgctggttcaagaccggcttcgcccagggccagatcactcaatgcgacacgtttaccgccaagagtctttaaatgaataaacgattgggatggctgctgggcttgttagttacgtgttcaacctgggccgccgagcacggcgtcaaggacgtcagccctgatcgtttccacctggaggccggcgatctcagcctgggcttgagccaggactggcgccagccgctgccccaggtcacccgcgcgctgatcatcgtgcatggccgcctgcgcaatgcgcagacctacctgcacagcgctgaagacgccgccgagcacgccggccaggccaccaacacgctggtgattgcaccgcagtttctgaatgagtccgacgtcaagcgcaaccatctggaaaaccaggtgttgcgctggaacggcaatgactggatggccggcgagccttccaccggtccggggccaatcagctcctacggcgccctcgaccagatcatcaaacacctgggcaaccgcaagctgttcccagcgctgaaagaaatcgtggtcgccggccactccggcggcggccaggtggtgcagcgcttcgccctcaccggccacgaccacccaatgctgcaaaccgaaggcatcagcctgcgttacgtggtggccaacccctcgtcctacgcctacttcaccccacaacgcccggtgaagttcgacatcgccagttgccccggcttcaacgactggaagtacggcctgcacaacctccccgactacgccaagggccagagtgcccaacagcttgagcaggcttacgtgtcacgcaacatcacctacctgctgggccagcaggacaccgacccgaaccacccggcgctggacaaaagctgcgccgccgaaacccagggcgcgtaccgcctgattcgggggcgcaactattttgactacctcaagcagcggcatccgcaattgagccacacgctggtggaagtgccgggggtggggcataacggggatgggatgtttacgtcgcccgagggccagaaagtactgttcacgccataacctgtgggagggggcttgcccccgattgcggtctgccagctacacatgtgctgatttatacaccgctatcgggggcaagccccctcccacagttggtctttattgtctgggctggatcatctgatgcagcaccgtgcagtccgatgcatgccaatcggccaactccggccacgggttctccggcagattcaccaacaccgtccgcgtccccgccgcccgaccacaatccaggtcgaagcggtaatcgccgaccatcaccatctcgctgggcgctacttcccatgccgccgccagtttcagcaggccgtccggatcaggcttgggttgcgcgtcatcacgccccaacacatcctcgacggcaaagcagtccgccaggccaatggcttgcagggtgatatgcgccaactcccgcgcattgcgggtcaggatgcccaggcgatagccgcgcccggccagttcgcgcaccaggtccaccgcaccgtcggcagccactgaacccaacgccagctcgcgctcatgctccagcagccaggcatgcttggccgccgcaacctgcgccggcaacgctgccaggtgcgtgaggatgtcgtcttcgggcgggatttccaacgctacgcgaatggccgcgaaatcatgcaccgccaccgtgagcgtgccgtccatgtcgaacacccaatgtctaacgtccgccaggctcatgcccaatccttgcgatggcgaatcaggccttcctgggtcaccgaggccaccaactgcccggcgcggttgtacacgctgccccgggagaacccgcgggaattgccggcccacgggctgtccatggcgtagagcaaccagtcatcggcacgcaggtcggcgtggaaccacagcgcgtggtcgaggctggcgacctgcatatctttctgccatacggttttgccatggggcagcagcgaggtggtcagcaggccaaagtccgaggcgtaggccagcaggtatttgtgcagcgccggcgcgtcggccagggcgccgtcagcacggaaccacacgtacttgaccgggtcggacggctgcgggttgaacggatctttttcggtgaccgggcgcacttcgatcggcttggggcacagcagcttgtcacgcatgtgctcggggatcaggtgcgcacgctgctgggtcagttccagctccgagggcaggttttccgggccgaccaccaccggcatggtggtctggtggtcgaagccttgctcgtcgtactggaacgaggtggtgcaagtgaagatcgggtggcctttctggatagcggtcacgcgacgcgtgctgaaactgccgccgtcgcgaacgcgatccaccgaatacaccaccggcaatttcgcatcaccggggcgcaggaaataaccgtgcagcgaatgcacatgccgcgcttcttctaccgtctggctggcggccgacagcgattggccgagcacctggccaccgaacagttggcgaaaacccaggtcctgactgcggccgcgaaagaggttttcctcgatcggctccagggtcagcaggtccaccagatcttccaatacttggctcattgagcaactcctaaaatctatcgggcattccgggctgcctatccgtgcagcgtgtccaaccattgggcgcgggtgatgcggtacaaaacatgatggcgcagcgggtcatcggctgcgaccttggggtgttcaaaatctgcctggggatcgtaatgcataccgatggcctgcatgactttttgtgatggcagattggcttccgtggtgaatgaaacaatctcgtccaagttcagacgatcaaaaccacagcgcaatgcggtccaggcggcctcgctggcatagcccaggccccagtgttcgcgggccagacgccagccgatttctaccgccggggtaaagtcggcatcgaagctgacattcagcaacccggtgaggccgatgaattccccggtgtccttgcgttgcaaggcccacaggccaaagccgtattcggcgaagtggccgcgaatccggccgatcaacgcggcgctttccaggtggctcagtgtggccgggaaataacgcatcacctgcgggtcggcgcacatgcgcgcaaagtccggcaagtcgctgtcgcgccattggcgcaataccaagcgtgcgctttccaattcgagtatcggctccatgggtcccctcccttgccatgtgcgtgagtgtacaacgcgggtaagatgcgccgcaggttcccgtcagaaaatcccatgcctttgccattgatctaccacgatgactacagccccgagttcccggcggaccaccggttccccatggacaagttccgcctgctgcgcgaccacctggtgtccactggactgaccgaggacagccaactgctgcgcccgcagctgtgcccgccggaaattctggccctggcccatgacgcggggtatatcgaacgctacatgggcggcgagttgtcccgcgaagaccagcgccgcctcggcctgccctggaacgaagccctggcccggcgcaccgtgcgcgcggtcggcggttccatcctggcagcggagcaagcattggaacacggcctggcctgccacctggccggcggcacccaccacgctcactacgattacccggcgggcttttgcatcttcaacgacctggcggtgatcagccattacctgctggccagcggccgggtcaaccgcgtgctgatctttgattgcgacgtgcaccagggcgatggcacggcacgcatcctccacgacacgccggacgccatcactgtatcgctgcactgcgaaaagaacttccccgcccgcaaggcccagagtgactgggacatcccgctgccgatgggcatgggcgacgccgactacctcaaggtggtggacgatgccctcagctacctgctgccgctctaccagcccgacctggtgctgtacgacgccggcgtcgatgtgcacaaggacgacgccctgggttacctcaagctgaccgaccaaggcgtcgccgcccgcgatgaaagcgtgatgcgccattgcctgggccgcgacatcccggtgatgggcgtgatcggcggcggctacagcaaagaccgccccgcactggcccgccgacacggcatcctgcaccacagtgcgcagcgggtgtggacgtcatcaggttgtcactgaactgtgagcgttacccacaatgcctgtggaaccacctgtggataacttgagcgtaaggcgctgaaagccagaaccagtatagcccgtaggaagctgtacgttttttaaccagaatcctttccacaaccgtgaaacgttgtggaacatggcatttatggccgttttgcaacaaaactgccgcaccccgccatcaacctgagggcctcttccgctttcagagtacccagcgatggcaacctacaagatcggcagcagctcgacgcccggcaatgacgacgccctgaagaaagtcgccgccaccttcgacgcggcaatgtcccgcgccctgtccggtttcaaggacgccgcccaccccggcaatttcaaggtgctggcggtgaccgacaaccctgccctcgcctccagcaaggccgacggctaccgcatcgcccaggccggtgacaccgcaccgggcctggacacctacaaagccatcggcccggccgatgaagtcggtccagggatgattcgctacgaaaccctatcgggcgataaggtggtcgtgagtaaggaaaccaacagcgacctgtacgaaaaagtgaagtccgatggcgagacctggggcctgatcaacgacagcaaaaacgcaggctaccacctggccggggccgatgaagccggcagcgtgagcctggtgggcacgccggaagaactcggccacgggctgatccgctacgaaaccgcgtccggtgacaagatcatcgtgtcccaggctatcagtcccgacctgtacgcctcggtggtcaaggaatccaacggcatttttggcgtcggcggcgccgtggacaccaattggatcgacaactccaaatacgccagcgccaaggactgggacaagattgtcggcaacaccagcggcacgccgacccaggaagagcgcgacctcgatcgcccgcgcgccgcctcgaaaatgctcagcgacaactgggacaaatggggcctgcacgaccgccccatcgacttctccaacccgcccgccgacctgccgcccgaagcccaggcctgcctcaaatacctggccggcagcccgagcctgatgaacgccctggacagcggcggcctgggcaaaagcgacggggtgattacccgcgccgatgtggataagttcatcagccaatccaacaaggatctgtcagctgcctcgaagtcgtacagcaccttcctcagcaagaacccggacgcgacgagcctggccaagcaaaacgccaagtccgccgccatcgtcatggctaacatctccctggtgagcagcgccggaccggagatgcagggccccaaccagcgcgccaacaacggcagcctgaacaccgccaacctcaaggcgatcaaggatgactcaggcctgagccccgagctgaccggtgccgcgggctactggtcgacaccgggcatgctgcgcaccctcgacatggccggcgacctgcccgccaccgcgaaggctgacggcatcacccaacagaaaaacatcggcgcctggctggaaaaccaggcgcccaaggacgaccacggcgtgttgatgatgctcagcaacgcctcggtgcgcagctcggtggccgacgtcgacacctccaagctgaccaaggacgtgctcgaacacccggaaaactacgacggcaaaaccaaagccgcggtgatgatggaaatcagtgacgcccgcgcccgcatggccgccagtgacaaagtgggcgacggcgacctgtacgccgggatcaccgccgatacccaataccacctcaacccgaccaaatccaaggtcaccgaccagctcgacgccgccgtcgccaagctttccagtgacccggacgtgaagaccttcctctcgcagaaccaggcctccggcatgcgcgatatcgtcaacagcgacccggcgatcaagcaccaactgcaggcctaccaggacggccagatcaacagcggcaatgtgctcaacaccgccctggccaccaaaggggctgatggcaaaccgctgtcgttgatcgacgctctgagcctggccggcaccgacgccaccctcaccgacctggccctgggtggcgacggccatgtggacctcagcgtcattgccgaaaaatccggcaagtccggggacatcgagcaattcttcaaagaccacatcctcaacggcaaagacctgcaagacgccctcgcccagccgaacgccgacccgatgaccgccatcggccaatacgcggccaaggcggagttgctcaaggagttcctcggcgacaaggtctcggcccaggattcgtcgacggtgcagcaatacgtcaaccaggcggtgtccgactccctggtcaacggcgccaacgacgacgtgctcaaaggcgcgttcggcgatgccaatggcaattttgacgaggccaagaccacggccatcatcgacaaagccatggccgacgacccggacctgttcaaggatgccagcggtgtgcagatcaagccgcaggacgtgatctcgttgatccgctcaatgtgggacgtgaaccgccagggccagaagatcagcgacgtgctgcccaaggccgtcgatgggctgaagctcaacgccagtgacgcctataaacagggcctgctgcatatcggcagtgcgctgctggccggcggcgtactggcggcgcgctcggccaccggcggcaacagcccggcggacaacgccgggcgcgtggcggcgggcatgcagttcgccgggctgatcaccgaaggcggcaccaagtacgccaaggaggccggctacggcatgacctggaaacccacgccgattgacccgaacaaaccccagggcatcggcgacttccccaccggcaaaatggtgcagaacaccgacggcctcaaccgcctgggcaacctgggcaagatcgtcggcggcaccggcagcttcatcggcggcgtgttcggcctgatcagcggggtcaacagcgcgtttgccggcgacaacgtcaacgccggtttctccctcaccagcggcgccctgggcaccggcgcggcggtggcctcgattattgaaggcggcgccggcctgttcggcgtggcggatgcggcggcgattgccggcaccttcgccggtgtactcggctgggctgcggcaggcgtgggcatcgtgacgtcgtttgtgttcccgatcatcgaggtggtgaagcgggaaaaacagcaggacgcgttctttggcaacctggtgccgaccctggataaatatggcctcactggcggcccgatcaccgacgccgaccgcaaggatgagtacccgccttacgccaataccggttttgcctgacccatatgagcccgctcgccactacagattttctcccccccgtaatggcgcggcattgcttacaatggccaccctttcgttttcaccaggcttgacgatgtccgctactgctccttcccacgttgccatcatcggcggcggccctaccgggctgatggccgctgaagtcctgagccaggcaggcgtgcgggtggacctgtacgacggcatgccgtccgtggggcgcaagttcctgctggccggcgtgggtggcatgaacatcacccattccgaagcgtacccggcgtttctttcgcgctatgccgaacgtgcgccgcacatggcgccactgctgcgtggttttggtgccgaggcgttgtgcgagtggattcatggcttgggcatcgagacctttgtcggcacctcaggccgggtgtttcctacggatatgaaagccgcaccgcttttacgtgcctggctcaagcgcctgcgcgatcagggcgtggttatccacacccggcatcgttggctgggctggaatgccgagggcggcttacttatccacaaccccgaaggcgaaaaaactgtccacagcgacgccgtgctgctggccctcggcggcggcagttggtcgcgcctgggctccgacggtgcatggctcaagttgctggaggatcgcggcgtgccctgcaccgcgttgcaaccgagcaactgcggtttcgaggtgtcggcctggagcgaattgatggtcagcaaattcgccggcgcaccgttgaaaaacgtcgccatcgggctgggggatgacaagcctcggctgggcgaatgtgtggtcaccgccaccggaatcgaaggcagcctgatctatgcgctgtcagcgccaatccgcgaagcgatcaacagagacggctcggccaccgtgcacatcgacctgctgccgagcaagccgctggacaaggtccaggctgcgctggccaaaccccgtggctcacgctcaatgagcaaacacctgcacagtcagttggggttggatggggtgaaggcagcgctgctgcgggagttgacaccggccgaccacttcaatgatccggcgcagttggcggtggcgatcaaggcgctgcccttgaccctggtgaagacccggccgatggatgaagcgatcagcaccgcaggcggcgtgccgttcgaggcgctggatgagcggctgatgctcaagcagttgccaggcgtgttttgtgcgggggagatgctggactgggaggcgccgaccggcgggtatttgctgacggggtgttttgccagcggccgggcggctgggcgggggatgttggagtggcttaatcgctgagatttgcgctgaattcaaggccgccatcgggggcaagcccctcccacatttgactgtattcacacatcaaagtgtgggagggggcttgcccccgatgaggccatcagcagcgccaaaaaatcatttcttcttgcgcggcccggtattgaaaacaggcaccttgcgcaccggcttgatcgacggctccaccggcgccgcttcgccgctgtccacccacttgcccaggttgcgcttaccgccaccacccgacgttttaggtttcttcggctttttcggcttcttcaccacctgcccgctggcatcggtgtccggcacgcggtgttccggctcgaagtccggctccatcttgcgggtcaaggtctgacgcgtgagcatctcgatggccgacagcatgttcacttcatcggcacacaccagggaaatcgcctcaccggtgttgcccgcacgcccggtacggccaatacggtggatgtagtcttcagccacgatcggcaaatcgaagttgaccaccagcggcaagtcttcgatgtccaggccacgggccgccacgtcggtggcgaccaggatctgcacgtcactcgacttgaaacggtccagcgcacgttggcgggtggcttgcggcttgtcaccatggatgccgtcggcgttgatgcccaggccctgcaacttatccaccagcgcatccacgccgttacgggtcttggcgaacaccagcacctgcttccagcgacctttgcgcatcaagtgcacaaacagctccggcttgcgcttcttgtccaccggcaccacccactgcttcacggtgttggcagcaacgttgcgcgggctgacctcgatgctcagcggatcgttgagcatctgcccagccagcaggcggatgtcatcggagaaagtcgcggagaacagcaaggtctgacgctttttcggcagcatgcggtagatgttcgccagctcttcggagaagcccaggtcgagcatgcggtcggcttcgtcgagcaccagggtttgcagctggttgagtttcagcgcgttctggcggaacaggtcgatcaggcggcccggcgtggcgaccaggatgtcgacgcccttgcgcagcttcatcatctgcgggttgatgctcacgccgccgtacaccgcgtaggtggtgagcggcaggtgttgggcgtactcggcaacgctggcgtgaacctgctcggccagctcgcgggtcgggcacaggatcagcgcccgtgccgagttggcggcgactttcggcccttccatcgtcagcagttgcaggagcggcagggcgaaaccggcggtcttgccggtgccggtctgggctgcggccatcaggtcgcgaccggccagcaccgccggaatggcttgcgcctgcaccggcgtcggggtctggtagccaagcgtctcaagggcgcgcagcaagggttcgatcaggccaagggtggcgaaagtcatgtgtttaccgtaggaaaaattcagcgcaaggtcgcaatgcgccgcagtttaccttatttccggcttgggcttgcgccactggggcaggctgatcaacagcaccgcgctgataatcaccagcatcgccagggcttcttcgacgccgatggtctcacccacgaacacaatccccagcaataccgccaccgccgggttgacgtaggcatagctggtcgccgccgccgggcgcacgtgcttgagcaggtacatgtaggcgttgaaggcgatgatcgaaccgaataccgccaggtaagccagggccagccagccctcgatcggtggcaccgcgtgcaaccgctcaccggtcagcgcactgcccaccaacagcagcgcaccggcaatgatcatttccgccgcgctggccatcgcgcccgccggcaacggcaagtgcctgctccacaccgaaccgaaggcccacgacgcggcggcaaacagcaacaacatcgcgccggtcgggcttgattgcaggttggagcccatgttgagcatggcaatgccgataatccccagcaccaccccggcccactccaggcgggtattgcgcgcgccccagaaatagccgcacaacaaggtgaacaatggcaccgtcgccaccgccaacgccgctacgccggacgcgacaccggtgtgttcggccaccgtcaccgcgccattgccgaaggtcagcagcagaacgccaatcttcgccgcagccttccactgcacccaggtcggcgccggcgccccgcgccagcgcaaaaaaccatacatcgccaaaccggccaccagaaagcgaatcccgcccagcatcaacggcggccagtactccacgccaatgcggatcaccaggtaggtagagccccaaatcacatacagcgcaaaaaaggcagcgatcaacggtaagggaaagcgacgtgggccaggcattgggcagctctaaggcagagagaagagaggcttattctaaaaaggcaggtcgttaaacataagttacaaaacctgtttaaaacgccgttacacttttcaaagcatggttgtgaaggctataaaccgtgctttcgaaagccacgcacaactggagccttatcatggacaaatacgaccgcatgctcctcagcgcactgctcaaagacggccgtgcgtcctacgcgcaactggcccgcacggtaaacctctccgcccctgccgtggccgagcgcgtggccaaattggaggccagcggggtgatcaccgggtatcaggccaaggtggatttatccaaggtggggttgccgatccagtgcgtgattgaactgcggctgaccaatcatggcagtcagaaggtgtacgacgcgctggcggaaattccagagctgaccgaatgccatcgggtgaccggcgacccgtgcgtgatcatgcaggcggcggtggggtcgatgccggagttggagaatttgatcaaccggatcgcgaagttcgggttcagcaagacctcgattattttgtcgagtgcgatagagcggcgggtgccgttggggcagttggaggggaatgggaaaaatggtggttgaaccgcaaagtcgacaatctgaatgaagcggaaaaacagaagggtcctaggcagcgataggattctgcctactgaccattcagaaacctgccttcaaaagccaagttttcaatggccagcaagacctatctctttcatttgaaggatgtttccgagagaatcctggagccttgcgtcagccggatccggtagctagtctcgccccgtcatcgaaaaaatcggtgatcggacgtgcaagtccagctcgcaaaggtgcacaaacgccctacatctcaacgtgcggttttaatgaccgacgtttatctgttatggcggctgtgcgctggagaccttcggggtctgccgggttctcctttgccccggtcttgcacacctgcgtacagctgccaccctctttcgcgtgcaagcgaacggtgatggcttcttaattcagaggagttacaccatggtcaaagtaacccccgatccaccccgtttcctcagcgaagacgccctgctcaaccgccgagccatcgactattacctaaaagcctgcgccccggatgcgcccgccttcaccctgaacgacaacctgagtttcgaagacgccctcgcccatgcggccgatttgctgcattgcgcggtggagacagcgcattcatcgaatgaggcgatgaaggcgcaacagcgggccgtgatgcatttggtggagatggcgaagggggtggtggatcgggcgttggcctgtgtgcagcctcgctaaacaccgcagaacccatgtgggagggggcttgcccccgatggcagtgtgtcagccaatacatctgtagctgacaggccgctatcgggggcaagccccctcccacatgttgagtttcacattcagagctcagtattttggggcgtgtggcgaggtcagaacccgcgatgcttcttcaggtgctcattgatcttcgccgccggcactttctgcaaggtgcacagcaggtcgtgggacagttcgcgcaagccgtgggtacggcgcagttcctgggccaggtgcgccgtgaggttggccgccatctccgcatccgccagcgcccggtgggccttgccggtgtggggcagctgagcgaaggcgttcaacgtgccgagcttgtgattgggcgcagacggcatcaggcgacgcgccagcaacagcgagcaggcaaatttctgtaaccgggtgcggcggatcaagcccaattcataatcccagaacttctggtcgaacgcagcgttatgcgccatcagcggcgtagtaccgacgaactcattgacctcgttcatcacccgctccgccggcggcgcgctgcgcagcatggcgttgctgatgccggtgagttgttcgataaaacccggaacgcgtacaccggcattcatcaggctctggtagcggtccacgatctggccacgctcaaggatgaccaccgcgatttccgtggcccggcagtggctgctcggggtgatgccggtggtttcaaagtcgatgaccgctatacgttccaaacctgttccaactccgtaaaagatctatttgagcaacaacgcgccttcaatcggcacgtagcggctggcggcgcgaatcagcgaattggccgtcagccccggcacgccataggccacggcttcaacaccatgcttgtggataacccggtctaggagcatgtcgaagtccccgtcgccggaggccagcacgatttcgtcaacgtggtcggcggcgtccatgatgtcgagggtgatgcccacgtcccagtcgcccttggccgagccgtcgctgcgctggatgtatggcttgagttttaccgtaaagccgaggttgcgcaggatttgctggaactgctgctgcttgctgtcgccacggtcgatggcatacgcgtacgcctcgacaatctgcccgcgcgcgctgatgtcagcccacaaagccgcatagttgaagtggcaaccataggcctggcggacggtgtagtagaggttttgtacatcggcgaacactgcaattttcttcaccgcacttcctcatgacagccaggcgccagggcccggaaaggctgcaagtatgccagtcgcgacgaggttgtcgggaaaaatcagaccggggcgacgcagcgccccgggccgaggtgggtcagacgaaggaatcgtcgtcgccgaaagaagacgaatcgtcggaatagtcgctgtcagcgaagctgtccgaattgttgctgccccagctgtcgttgccggcgtacttctggtcatcattgccccagttgccgttgtcactggcaggcgctggctcctcacgaatgatttcttccacgacttgcggctgttgcgaattgtggttgaacaggctgctgatgccttcggccagcaatacaccaccggccacgccggctgcggttttcatcgcgccgccgaggaagccgctgcccaccggagcggctggagcaggctgttgataattctgctgcggggcaggttggctgaacccaggccgcgccggttcgcgccagccgccaccagaagaaggcggtgcactttgagccggctgctgatcacgggaaccaccgccgccaaagatgctcgacaggaaaccgccgctgctcgccggagcaggctgcgcggatttggccctctgcagttcatcctgcaattgctggatctgctgcgcctgctgcttgttctgcgcgtcgaggctcttgagcgcatgttcctgcaccaggatcgactgggtcatgtagtacccggccgctggttggcgcgtcatgtgctccttgatccgcgcttcggcctgggcgtcgcggggggctgagtccgtttcggcttgttgcaaccgtgaaaacagtccatcgatcagggtttgctcttcgctgttcatggcgacctcgttagattgccggtagaaatcgtggtgtcgcctgtgatcaggcgccgtgctagttatgggggtgttacgagttgtttcaatagtctttactcaaggtttacgtttgcttaccgccggtgatgatcggttaaagtgttgcccttgctttcaggcctgcgatgaacttgatgaatccgttagacgtgctgcgcgactccttccgtttcacccaacgcaacctgggcgctatcgtccagttgtgcttgccgttggtgattttcgaagccctgctgcaacaggtgctgaatcacgtggtaggcgaggatgcattccccggctacagcgtggtggtggggttgctggtgtacccgctgtacaccggggccttgatcctgtttctggatgcccgcacccgtggcgagtcgccgcgcaccaaggatgtatgggccatggccctgactctgtggccgcgctttgccctgctgacagccatgagcacactgctgattctgctggggctgtcgctgtatttcctgccggggctgtggctgatggtggtgctggcctttgccgagtacctgctggtgctgcgcggcatgccggcgttggaggcgatgaaggaaagtttccgcctgagccgtgggcatttctggcggatcctggtgtgcctgctgtgtgtgatgacgccgttgtggctgctcaagggcgccagcgtagcggcctaccccgagcccgcgccgctgctgggcctgttactggacagcgcccacagcttcctgcagttgtttaccagcgtggtgctgttccgtttattcatgctgatcggtggcgatgccgacgcgcggtgatatgctccgtgtcacctctgaaacgctataagccgagccgatgacccgtttattgcgcatcaccttgctgagcctgctgatcatcgcggggttgtttgcagccatggtctacagcctgacctggcgccccgagcccaaggaaaccctgccggtgagttgcgttgcgccgcgtgcgcccacgctgctgccggggcaggcgctcaaggtcatgacctggaacgtgcaatacctggccggcaagaactacgtgttctggtacgacacggtcgatggcagcggcccggatgatcggcctaccgtggaagacatggccgccagccttgacgaagtggcgcgggtgatccgcgacgaacaacccgacatcctgctcttgcaggagctcgacgaaaacgccaagccttcccactatcaggaccaactggccctgctgcaagaacgcctggtcgacctgtacccatgcagcgcccaggccttcgactggaaagccgacttcgtgcccgattggcatatcttcggcagcgtcggccgaaagctcgcgacactcagccgctatcagatcgaacacgccgaacgcctgcaattgccggcacccgaggccaacatcctcagccgccagttccagcccaagccggccttgctgctgacttacctgcccctgagcgacggcggccaactggcggtgctcaacacgcgcctggacggtgacgccccagggcgcagcgcggtgctggagcaggtacaaaccacggtcaagctgctggataaattcgaaggccgtggcacgccctggctgatcggcggggatttcaacctgctgcccctgggccagttcctgcgcctggacgccaccaaacgcgggcagtattcgccagacagcgagctgcacctgctgtgggacaaatacccgatgatcccgagcaacagtcaatccagcgggattgaccgtgaaaagtggctgacccacttccccaacgacccgagtgtggacgggccggatcgcacgctggattacctgttctacagcccgcggatcaagcgggtcgaggcgaaggttcgccaggaagacaccttgcgcatctccaaccacctgccggtgatcgcccggttcctgctaccccccgcgccataaccaacaccgtaaaacccatgtgggagggggcttgcccccgatggcagtgtgtcagccaatacctctctcgctgccagaccgctatcgggggcaagccccctcccacatttggaccctgtggtgttacgacttgcgaggttttatccgtgccgtcgcctcggccaccaacggatcatccggccagtaatgcttggggtagcgccccttcagatccttcttcacctcggcgtaggtactgcgccaaaagttcgccagatcctgcgtgacctgcaccggccgccgcgccggggacagcaggtgcagtttcaccacctggcgcccaccagcaatgcgcggggtgtcggccagcccgaacaattcctgcaagcgcaccgccaggatcggcggctgttcgctgtagtccagccgcaccgacgagcccgacggcactttcacatgctgtggcgccagttcatcgaggcgctggggcagcggccacggcagcaggttgtgcaggaagctggagatatccaggttggcgaaatggctcaggcgcgagactttgcccaggtagggcatcagccaatcttcaagattggcgagcaaagccttgtcgctgatatccggccactcgctggctttaccggcgtcaaggtgacgcagcagcatcacgcgggcctgccattggcgcagctccggcgtccacggcagcagctccagacctttgcgacgcaccaggttgaccagcgcctggctgcgtgcggactcgtcgaggccggtgagcggttcgcggctgagcaccagttcaccgactttgcgttggcgttcggcgcgcagcacgccttcgcgctcgtcccagtcaagctgatcgacgttgcgcacttgttcggcaagcaccgtgtcgaacagcgccggatcgaaatccgccgccaggtaaatgcgttcttcacgctggccctggcggctgcccaggtcggcgatgaccagccagggttgcttcatcaggctgtcggcctcggcgaacagcgccgcgcggccgttggccaggcggtattcggcgccgcctgggcgacgttgctgggcgacgcggtccgggtaggccagcgccaacagagcgccgagccaacgcggatgatcgggatccgccacgggttgcgtggcctggcctctcaagtagccgcgatattgtcgggccaattgtttggcccgttgcacgccgccttgagtaccgcgcgcgcgttcttcaccggacagcagcgccaggcgactgtgcaaatccgcaccgccgccgcgcaggatgtcgcgctcgcccaacagcgcggcgacatcgcacgcggtgctcgccagccccaggtcctgcccgcgcaacagcagatgggcgatacgcgggtgggccggtaactcggccattttctggccgtgggcggtgagtgtgtcgtcattcaacgcgccgaggcgcacgagcaaatcctgggcctgggcatacgcggcggtaggcggcacgtccagccacaccagttgcgtgggcgtgacgccccagcgtgccaactgcagggccaggccagccaggtcggcggcgaggatttccgcgctgccataggcggccaggccttcatgctggtcctcggaccataggcgataacacacgcccggctccaggcgccctgcccgaccggcacgttgcgtggcgctggcgcgggagatgcgttgggtgtcgaggcgggtcatgccgctgccggggtcgaaacgcggtacgcgtgccagcccggcatcgatcaccacgcgcacgccgttgatggtgaggctggtctcggcaatattggtcgccagcaccactttgcgcttaccggcgggcgccgggtcgatggcggcgcgttgggcattgaggtccagttcgccatgcagcgggcacaacagcacatcgctgcgctcgcccaaggcgtccgccaactgctggttgacccggcgaatctccgcctgccccggcaagaacaccagcacgctgccggtttcgtcgtgcagggcttcgaggatggtttgcaccacgcgtggttcgatgaattcaccgggctgataagggcggccccagcgcatctgcaccgggaacatgcggccttcactgcgcaggatcggcgcgtcgtccagcaggctggcgaggcgctccccttccagagtggcggacatcagcagaattttcagcggttgctcgtcgcgaaacagctcgcggccgttgaggctcagggccagtgccaggtcggcgtcgaggctgcgctcgtggaattcgtcaaagatcaacagccccacgccctccagcgcagggtcgtcttgcaggcgacgggtgaggatgccttcggtgaccacttcgatgcgggtgttggggccgactttactgtccaggcgaatgcgatagccgaccgtttcgccaactttttcacccaactcgctggccaggcgttcggccgccgcacgggcggccaggcggcgaggttcgagcatcaggatggtctgcccggccagccagggctcgctcaataacgccaaaggcacgcgggtggttttaccggcgccgggcggcgcttccagcacggcttcatggcgattcgccaaggcgtcacgcagggcgggtaaaacttcatcaatcggcaacgaattcatactggctccaaagcagagcggcgagtataacggcgaactgccgagtgccgacgatggtctcagaaacgccacccacttcaattgcgaatgcaatcaaaggtgggagctggcttgcctgcgattgcggcgtgtcagccaatgcacttctgactgaaccaccgctttcgcaggcaagccagctcccacattggaacggcgtcgttcagccgatctagcttatagtcctctttaaatcgtgttcaggagaatgttatgcgtatcgcttcccgtgtcatcggcggtgtcctcgccgtcaccctgctgagccaattgacggcctgcggttcgatcttctacccggaccgccgtggccaaatcgatggcaagatcgacccgaccatcgccgtgctcgacgccgtgggcctgctgttctatgtgatccccggcctgatcgcgttcggtgtggacttcgccaccggcgccatctatttcgaaccgggcaagaccgcccaggtcgacccggccaaactccacgacgccatcggcgccgacggtaaggtcgacaacgccaagctgcaaagcatcatccagaaggaaaccggccgccgcctgccgctggacgacccgcgcatgatccagttcaagggcagtgtgcagcaactggcgtccctgggcctgcaacccgctgcctaaggaccgtccatgaccagcagtcccgaacacgccaggctcttgcgcctggccacccgcgcttcggtgggcgtggcctgcgcgctgattatcaccaaggccatcgcatggtggctcagcggctcggtgagcatgctcgccggattgaccgactcgctgttggacggcgtgacctcgctgttgaatttgctcgcggtgcactacgccttgcgcccggccgatgacgatcaccgctatgggcatggcaaggcggagtcgctgtccggcatggcccaggcgctgtttatcggcggcagcgcggtgctgatcgcattccaggcctaccagcgcctgcaacacccggagccggtcggcgcaccgtggctgagcattggcgtgattgtgttttccctggtgctgaccgtggcgttgttgatgctgcaacaccgggtgatccgcgaaaccggctccaacgccgtgcgcgccgattcgctgcactatcgctcggacctgatgctcaacggcagcatcctggtggcgctggtgctggcggggtttggctaccaccaagtggacgcctggttcggcctgggcattgccgcctacatcttgtggagcgcgatccagatcgcccgggaaagctttgcggtattgatggacgaggagctgccgccggaggtcagccagcacatgctggaactggcccgtggcgtgccgggcgtgttgggcgcgcatgatttgcgcacgcgcatttccggcagtcactggtttgtgcaactgcacctggagctgccgggggaattgacgctgtcagtggcccacggcatcagcgaccaggccgccgacgccattcacaaagcctacccgcgtgccgaagtgctggtgcacgccgacccacgggaagtggtcacgggcaataagccctagtactgcacctgatagccgcgactgctcaggcagttgccctgggcctggcggtaggtttgcaccaccgccgggtcaggcgcgtaggtgacttgctgcgggtcgaaaccgctttgctgcactgcccagcgatagcagtcataaccgtcctgctgcacctgggccggcgactgcccgttggcgggatacgccaccacgtcatagccattgccttgcggcgcgggcggcggcgctggcacctgcgtcggtggttgcaccaccacgtactgttgggagctgctttcgtaggtgtaatacgcaccggccgcgaggaagaacagcgtgctgcccacccacacttcgcgcgcgtagtccggcaggtaatgcacgcggatgccgtagggtggcgtcaccactacataacgcgggccttgcgggcgataccaatagccgccggagtagaagtaatcctggcctcggtaaggcacgcggtagttgcggtcggggaagcggtcgatcacgtagcccgggcgatgttgcgggcctgggccccagccattgccatgcccatcggggcgacctggccagcggttgtcgccggggcgcgagcctgggccgccggcttcccagtgtgggttgccgtcattgcggcgcgggatgtcgcggtagtagccctggcgcggttcctgggtctggcgcacggtgtcggggcgactctggatcggcaggttgttcgatggctgtggttgaggctgcggccgcccttgctcattaccttgggggcgcccttgccattggccaccaccgttttggccaccacgatcaaaatgctgattctgcgggcgtggctgattgttttccggccgaggctgattgttctgtgggcgcggctgctcattcccccccccaggtcgcccaccctccggccctctttcatgctggccgccgccatcaccgcgcggcccgttgtcacgctcgtcggctactgcctgggcgccaacggtgaccatcagcaaacctacacctgccatacgccagatgcgcttcatgctattcctcactgcggattagggcctgtccatgagactggaaaagccaggcccggttcgcggacaggttatcagcaggcaaaagaaaaggggtgacccgtcggccaccccttgagaacttcgtcctggctcaacgcttttggcgttggctcacctcacgccgtcttgtggacagtgtgcagcctggaggccggctcaaccctgctggggtggcggccgcagctggcctgattgggcgggctgctgtggactgttgtccaggcggtgattctgttgataaagatacccgtaggcgcccgacagatgattgcgaagattgcgtcaataaacagtgcttgcgcaatttttaacccttcatagataattcaccgcaatagttacgacaaaggccaacccaatgagcaagcttgaccgatacgacctgagtattttggcggaattgcagcgcgacgctaggatctccaaccaggagttggccgaacgcatcggcttgtcgccgtcgccttgctcgcgccgggtcaagcagttggaggacgacggctacatcgcccgccaggtcgccctgctcgaccgcaagatgctcggcctgagcctgaccgcctacgtgctgatcggcatggaccgccacacccccgagcgtttcgagaacttcgaggcggcgatccgcaccctgccccaggtgctggagtgcagtctggtgacaggcatggatgcggactatcagttgaaggtggtggtgccggacatggatcactatcagaaactgctgctggggcatttgacccgcatcgaaggtgtgaccagtgtgcggtcgagctttgtgctcaatcaggtattgaacagcaccgaactgccactgacgcacctgcgaacctgagatcaatataaatcaactgtgggagggggcttgcccccgatggctgagtgtcagtcagcctatatatgactgacccagcgtcatcgggggcaagccccctcccacatttggattgcgcttcgactcaggtcaatgttgcgtctgtaacactgccttatacttcccgcctgctcctgtcggaaaaacaccatgaacaacatcgaccccgccctcttcgaagaatggatgatgaccggcctggtcacgatcctgatcattttcatgggctttatcgtctgggacctggcgaagaagtccaaggccgggcgctttggctcgttcattctgttcttcgtgctgggcctgggcgtggccgcgttcatcatcaagagcgtggtgatcggcctgatcgagtccggcgccttataagcgcgctggtacttccttccactggccttggtccaggccgtcgatcgaccaatcgccaatccgcacgcgcaccaggcgcaaggtaggcaaaccgacagcagcggtcatgcgccgtacctggcggttgcgcccctcacgaatgatcagttccagccagtgcgtcgggacgcttttgcgaaagcgcacgggcgggttgcgcggccacagttcaggttcatccaactgtcgggcctcggcgggcaaggtcatgccgtcgttcagttcgacgcctttgcgcaggcgttgcaactgttcctcggtgggttcgccttccacctgcacccagtaggttttcgccagcttatgcttggggtcggcgatacgcgcctgtaattggccatcgttggtcagcagcaacaggccttcgctgtcacgatccaaacggcccgccgggtatatgccggggatatcgatgaaatccttgagggtcgcgcgcccgccttcgtcgctgaactgggtcagcacatcgaacggtttattgaacaggatcaacttcggctcggccggaggcgccttggcgacacgccgcgcagcggaatacggggttttcacgccagggcggcgcgaatcgggacgggtgggacgggacatggcaaaggaacatctaacggtcaggaccgacaatgctagtggcctgaccgttaaatgaccatcccaaccgcttagcggaacggcggctcgtcgaagctgcgcagtttgcgcgagtgcagcgagttgagttcggtgcgcagcaggtccaccgcctcgataccgatcttcaagtgctggctgaccgcacgctcatagaacgcgttggccgaacccggcagcttgatttcgctgtgcagcggtttgtccgatacacacaacaaggtgccgtacggcacccgcaaacgatagccttgcgcggcgatggtgccgctctccatgtccacggccacggcgcgggacaggttgatcagtgggcgttcctgggcccagcgcagttcccagttacggtcgtcgtaggtcaacacggtgccggtacgcaggcgttttttcagctcttcgcctttttcgccggtaacgttggcggccgcttgctgcaacgcaagctgcacttcagccagcgccgggatcgggatgttcggcggcaccacgcggtcgagaataccgtcgcggcgcatgtaggcgtgcgccagtacgtagtcgccgatggtctgggattggcgcaggccgccacagtggccgatcatcagccagcaatgtggacgcagtacggccaggtggtcggtgatgttcttggcgttggacgggccgacgccgatgtttaccagggtcacgccgtggccatcggtggcctgcaggtggtaggccggcatctggtaacggtgccacaccacaccggcggcaattgccgacgcctcaccgtgatccatgctcttgtcgatcaccacgttgcccggcagcaccatgcggataaagcgcgggtcgctgcgcagttgctccaggccatgcaggatgaactggtcgacataccggtggtagttggtcagcaggatccacggctgcacatggcgccagtcgctaccggtgtagtgcaccaggcggcgcagggagaagtccacgcgggccgcatcgaacagcgccaggggcagcgggtcggtgttttcccaatcgtacaagccatcggcgatgccatcggtggcggccgacaggtcggtgctcgggaatacgcgagccaaggtcgcagcggtaacgccggagccggccagttcatcgccctgctccaccacgtaggggtacgggatgttctgctggctcacgccgacttccacggtcacggtgaagtcgtgcatcagcggcaccagttgctccagcaggtatttacggaacgctgcaggatgggtgacggtgacactgtaggttcctggtagttgaaccttggcatacgcccgggtggtctgtgggacttcgccgtggcagtggtaagtcaggcgcagttccgggtagcgaaacagcgcacgttgtgcggcgtcgggctcgacgcggtctttgaggtattgcttgagggcttgattgagcgcgccagtggcacgctcatgcagggccgccagccggtccacggcttcttcagcggtttgaacgacaacaaaagcttcggtcacggtaagcatcctgtgttctgacttgcaggcctttatcttgcctgtatcccggcctcaccgaaacaccagagttggaatgcggtaaatgtgggagggggcttgcccccgatagctgactgtcagccaacacatctatcgctgacacaccgctatcgggggcaagccccctcccacatgtttaccgcattttagtccgatagattgggggtggaacgggtgacgagcgccgccacatccacaccacgaggcaaggtgccatagacccgagcggacgtttcgcccaaccgactggcgataaacccatcactgaccgccgcattccccgcctccagcaacaacttggcctgcaatgccacggcgatgtcttcggtgagttgccgcgcacggtactggatgtcctgggtgtccatgaacgccgacttgagctgttcgatatgccgcacaagcaacttgtcgccatgcccatcgcccagttcgacaaacagcgcctccagcacacccggctctttcgacaacgcccgcagcacgtccaggcactgcacgttaccggacccttcccacgtcgagttcaccggtgcctcacggtacagacgcggcaaaatgctgtcttcgacatagccggcgccgcccatgcattcagcggcctcgttgatcatcgccggcgcacgtttgcagatccaatacttgcccaccgccgtcaccagccgggcgaacttggcttcctgttcatcgtccagatgatccagcgcacggcccatgcgcaggctcagggccagtgcggattcgctttccagcgccaggtccgccagcacgttctgcatcaacggctgctcgctgagcacgcggccgccgaccgaacgatgggcacaatgatggctggcctgggtcagcgcctggcgcatcagggcgctggagccgaccatgcaatcgaagcgagtcatggcgaccatctcgatgatggtcggcacgccacggccttcttcgccgatcatccaggccagggcaccacggaattccacttcgctggaggcgttggagcagttgccgagtttgtttttcaggcgctggatgtagaactcgttgcgcgtgtcatccggacggtgccggggcagcaggaagcaggtgaggcccttgtcggtttgcgccagagtcaagaacgcatcacacatcggtgccgagcagaaccacttgtggcccaccagttcataggcctgccctggcccgcccgctcccaccggatacgcccgggtggtattggcacgcacatcggtaccaccctgcttctcggtcatggccatgccgatggtggcaccggccttgtgggcgatgccaacgttgcgcgaatcgtattgggtattgaggactttcggcagccagatgtcagccaagtcaggctgcagacgtagcgcaggcacacaggcgaaagtcatggtcagcggacagccggtgccggcttcggcctggctgtgcaggtaggtcatggcggcgcgggccacgtgggcgccggactgcggatgggcccaaggcagcgacggcaggccgtgttcgacagcggtacgcatcagttcgtgataagccgggtgaaactccacgaggtcgatgcgatggccataccggtcatggctgctgaacaccggtttgttctggttcgccaggaacccggcttccatcaatggcccgccggccaacgcaccgtaggcatcgatacgcgcttttgcccagccggcaccaaagcggcgcgaccattcctgcaaaggcaagtcgatacggtacaggttggtgccgtccagggacggcggctggttggtgacgtcgtgggtttcggcaaattgatgcaggttcatgacgggcctccaagaaaaaaggccacgttcagttgaggcctgcatttcagttaagcaccgtcataccccttaaaaaagtggcatacccgccgattgtccggcgcttttgccctctaaagggcgcaacaaccgacgctccaacaccgcctgcaatgcctcgaaacgcacaggcttggccaggcgctcggaaatcccgatgccatggcacccctcacgttccgacacattcagcgacgtgctcaaggcaatcactggtaattcgccacagcccggcagcgcacgaatctgacagcacaacgagaaaccaccctcgggaatatccaacagcactgcgtcgaaatccgccgcctgcaacgccgccaacgcgttcgggccgctgtccacggttttcacccggtaaccgagcttgagcagcatgccgcgcaccgccaactggccgacgctgttgtcatccaccagcagcaccgagcactcctggggcgcacgctgcttgtccggcgcaggcttggactcgggcgcgaccgggctgacctccacttccagctggaagcggctgcctttgcgcggctcggaatgatgggtaaggcgcccgcccagcagctcgatcagttgccggcagatggcaaggccgatgcccaggccgccgtattcacgggtggtggaaccatccagctggaagaagcgctgatacagggtggcttcatccaggaaagcaaagccgatcccggtatcggtgacgataaagctcaggcgcaagcgaccgtcgctgtggggcacgccgaccacacgcaggcgtaccgaaccttcgtgggtgaacttgaaggcgttatccagcaggcaatcgaggcactgcaacagtttgtcggcgtcgcccagcacacggtccggcagctcgtccgccacgtcgatggaaaacgccaggcccttgctctgggcgctggcgctgaactgctggcgcaaggtgtcgagggtaccgcgcaggctgaacacctcgggctgcgcaaccaggcgcccggcctgcaactcggtgagggtaaggataccgttgaccatgcgcatcatgtcccgcgccgagccggcggcggtttgctggtattgcgccaggtccgcatccagcggcacggtttgcatcagttcgagggagccgatcacgccgttcatcggggtgcgcagttcgtgggtcaaggtggcgaggaattcatccttgagtcggttgctgcgtgccaactgcaggttgagcacttcgagcttctggctggcgtcgaacaggatctgcgcctgttgctcacgcatggcattgatgcggtcggccagggccagggacaacagcgcgacttcgatcgccgaaccaatctggctggcgtacatggtcaggaacatattcggcaggtagcccagcaccatcagggtattgaccaccccgccgagcaggaacgccgaccaggcgatgatgaaatagcgcgccacccgctgcccgcaataccaggccttgatggccgcgacaaagatggtcacggtaaacaccagcgccaagccggtggccaggcgcagcgccagggcgtagctggtcatcaacgacagcagcatcaccacaccgccacacgccaccagcgccagcaacagacggttgatccagcgactgtgctgggccgtgtgcaggaagctgcgcgcaaacaggctgccgaacaacgctgccgagccaatcaggaacggcgtcgcggcattcgcccaccacgggttgtccggccagaagtactccactgccgcgccattgaccgacagctggtacatgccgaatgaagcgatatacaggatgtaatagaggtagctggtgtcgcgcacgctgagatagatgaacaggttgtacaccagcatgcccagcaacacgccatagatcaggcccaacacatacaggcgcagcggctgttgttccagatacgcggtgctggaccacagcgtcaaaggcgcctggatcgagccttcgctttgcaggcgcaggtagacggttttcgcttcgcccggcgtgaagtcgagtttgaacaggtagttgttctggcgaatctcacgggcggcaaacggcagcgcatcccctgtgcgcccggcgaggcgataggtgccggtgctgtcgggcaggtacaggtccagatggtcgaggggcgggtaggccagctccagcaaccaggtgcgttgggcttcaggattctggggcaggtagtgcagattgaccttgagccagaacaccgagcgcgaataaccagcattcagggtgtctttatcgtggggcttgaattgcgtgacagcggagggtgcgctgacatcggcgatggtgagggcatcggtcgggtcttcgagcacttgcagggctcgccccagcggcaggcttcgcgtgtcctggttgaactcgatggcgctggcgagcatcggcagcccgcacaacaataaaatcagcaaatagcgcatagagccccagcgtggcctgtccggttatgtcaaaaaagccccccattccttttgagaagacgtacaccggcaatacagttagtcgtttggatccactctagcatagccactaaaggctattagacaccattgaaataattttttgaaaggctctagaacggggctttcagcaattcgcatgcactcatttgggttgcagaaaccttccacccacggtgaaaatcctcctgtgcgcaacagccccgccaaaagcgtttggtggtaagctcgcgcaccatgaatatctacagctctcgccccgttgtcctctgtctctccggccatgatcccagtggtggcgccggcttgcaggcagatatcgaagccctgctcgcccagggttgccatgcggctccggccgtcaccgcgctgactgtgcagaacacggtcaacgtcagcgatttccgcgtgctcgaccgcgagtgggtgctggcccaggccaatgccgtgctcggcgactccgaagtggcggcggtcaagctcggcatgctcggctcgaccgcgatggtcgacaccgtggtcgaactgctgcaggcgcatccgcacctgccggtggtgtgcgacccggtgctgcgcgccggtggcggcggcagcctgggcaaggacgaggtcggttatgcgatgcgtgagcggctgttgccgttgtcgctgatcgccacgccgaacctgcccgaagcgcgcatcctcgccgaactgcccgaaggcaccgcagacgaatgcgccgagaagctgctgccctatataaagcacctgctgatcaccggtggacatggcgacgagcacgaagtacacaaccgcctctacagccgcgacggcacgcgccagacctttacctgccaacgcctgcccggcagttaccacggttcgggctgcacgctggccagtgccctggcaggtcggatcgcccagggcgaaggcctggtgagcgccgtgcagtctgccctcaactacacttggcgcaccctgcgtgacgctgaacaactcggccagggccagttcgtgccgcgccgtctgccgctggatttctgctcttaacagcacgaggcctgcctgatgaaactacgtggcctttacgccattaccgacagccaactgttggccggcaaattccttgcctacgtcgaagcggcgctggacggtggcgtgaccctgctgcaataccgcgacaaaagcagcgacgaagcccggcgcctgcgtgaagcagaaaagctgcgggagctgtgctcgcgctataagactcaactcattatcaacgacgacgccgaactggccgcgcgcctcggcgtcggcgtgcacctgggccagaccgacggcccgctgaccccggcccgcgccctgctcggttccaaggccatcatcggttctacctgccacagccagatcgaactggccgagcaggctgccaaggaaggtgcgagctacgtcgccttcggtcgcttcttcaattccagtaccaagcccggcgcccctgccgccaccgtcgaaatgctggcccaggcccgtgcgcgcctgcagctgccgatctgcgtgatcggcggcatcaccctggagaacgccgagcccctggtggcccacggtgccgatctgctggcggtggtgcacggcctgtttggcgccgacacaacccaggaagtcacgcgccgcgcccgtgcgttcaacgaccttcttagaatttcagtttagagagcccgatcatgtcccgttccgaaacgctgtttgccaatgcccagaaacacatccccggcggtgtgaactcccccgtgcgtgcgttcaagagcgtgggcggtacgccgctgttcttcaagcatgccgaaggcgcctacgtcaccgacgaagatgacaagcgctacgtggactacgtgggctcctggggccccatgatcctcggccacagccatccggacgtgctggatgcagtgcgcaagcaactggaacacggcctgtcctacggcgcaccgaccgccatggaaaccgagatggcggacctggtctgctcgatcgtgccgtcgatggaaatggtgcgcatggtcagctccggcaccgaagccaccatgagcgcgatccgcctggcccgtggtttcaccggccgcgacagcatcatcaagttcgaaggttgctaccacggccactccgacagcctgctggtcaaggccggctccggcctgctgacccagggcgtgccaagctcggccggcgtaccggctgcgttcgccaagcacaccctgaccctgccgttcaacgacatcgtcgccgtcgagcagatgcttaatgaagtaggccaggacgtggcgtgcatcatcgtcgagccggtggccggcaacatgaactgcgtgccgcccgcgccgggcttccttgaaggcctgcgcgagcagtgcgacaaacacggtgtggtgctgattttcgacgaagtgatgaccggtttccgcgtcgccctcggcggcgcccaggcgcactacggcgtcacgccagacctgagcaccttcggcaagatcatcggcggcggcatgccggtgggctgcttcggcggcaagcgcgagatcatgcagcacatcgcgccgctgggcccggtataccaggccggtaccttgtcgggtaacccgctggccatggccgccggcctgaccaccctgcgcctgatcagccgcccaggcttccatgccgagctgaccgactacaccacacgcctgctcgacggcctgcaacagcgcgccgatgccgctggcattccgtttgtcaccacccaggccggcggtatgttcggcctgtatttcagcggtgccgacgatatcgtcacctttgatgacgtgatgggcagcgacgccgatctgttcaagcgcttcttccacctgatgctggaaggcggcgtgtacctggcaccgagcgctttcgaagccggcttcacctcgattgcccatggcgaagccgagctgaaactgaccctcgacgccgctgaacgcgccttcgccgcactgaagtaataggctgcgaacatccggcaccgcgcaaacggtgtctgatttgctactttgcttacagatatttccgagtttttccgagaattcacctgcaatccggcagataacttgcccaagcagcagaaaaacgagtaaagactttgtaagcagaggcctgcttatttcataatgcgcgcttattggatcccccgagggtccgcgtgccccgtcagaggtaagtcgattcccatgaaacgcaccggccgcaccctggttctgggctgcctgttgctccttcagccgctgctggcacatgcacaagcaggcggcaactcgttgttaatcccagcgatgggtcgttgcaccctcaatacccagccagacagccaggccgaagctctgagcgcgtgccagaaacaggccgacggcggggatgcgcaggcgcaatacgagttgggcgagtacttccacgacagcaagaaccccgcccgcgacctcaacaaggccttgagttacttcgagaaagcttcgttgcagggccatgcccaggcgcaattccagttgggcaacatgttcttcaagggcgaaggcgtgccagccaataacgtccaggcgtacatcgtgctgaaaatggctgcggtcaacggcgctgaagacgcgctggacacggccgacgaagtagccgagcacatgcagcgcgatgaactggaagtggcgacccaggtgctgggccagattttccgcaactaccttctggaactgcagagcgccgatgggcgttcgcccttctcacccctgccctgacagccgccttacttctccggcataggcatcggaaatggcatcacattgctggtgccccgtgcctcgctgatcttcggcgtgcccaggcgctccacctcatcgatgcgcacaatcgaatgcatcggcacaaaactgcgcaccacgccttcgaactgtgccttgagcttctcttcgcccgggtcgacgaccaactgggtgcgctcgccaaagacgaactcttccacctccaggaaaccccacagatcgctctgatagatctgcttggcgtacatttcgaacacctggccctggttgaggaaaatcaccttgtagattggagcttcacgtttggtcatggtgggcgaacaacacatcggggatataaaagagggcgcgaactatagcatggcacccgatgcacaacgctaggaaccaatgggcatgccccctataatgcgcggttctttaccaccagttgacgattcccatggccaagaagctttacatcgaaacccacggttgccagatgaacgagtacgacagctcgcgcatggtcgatctgctgggcgaacaccaggccctggaagtcaccgcccgcgccgaagatgccgacgtgatcctgctcaatacctgctcgatccgcgagcgggcccaggaccgtgtgtactcgcagctgggccgctggcgcgaattgaaactggccaacccggacatggtgatcgccgtcggcggttgcgtggccagccaggaaggcgccgcgatccgcgaccgcgcaccctatgtcgacgtggtcttcggtccacagaccctgcaccgcctgccggaaatgatcgatgccgcgcgcgtcaccaagctgccgcaggtggatgtgtcgttcccggaaatcgaaaaattcgaccacttgcccgagccgcgtatcgatgggccaagcgcctacgtgtcggtgatggaaggctgcagcaagtactgcaccttctgcgtggtgccctacacccgcggtgaagaagtcagccggccgtttgacgatgtgctgtcggaaatcatccacttggccgaaaacggcgtgcgcgaagtgaccctgctgggccagaacgtcaatggctaccgcggcctgaccgaggacggccgcctggccgacctggcagagctgatccgcgtggtggcggccgtggacggtatcgagcgcatccgctacaccacctcacacccgctggagttctccgacagcctgatccaggcccacgctgaagtgccggaactggtcaaacacctgcacttgccggtgcaatcgggctcggaccgcattctggcggccatgaaacgcaaccacacggccctggaatacaaatccaaactgcgcaaattgcgcgcagcggtaccgggcatctgcatcagttcggactttatcgtcggtttccccggcgagaccgagaaagatttcgagcagaccatgaagctgatcgaagacgtcggtttcgacttctcctactcgttcgtctacagccagcgccctggcaccccggcggccgacctggcggacgagaccccggaagcgctgaaaaaagagcgcctcaatgcgctgcaacaccgcttgaaccagcagggtttcgagatcagccgacaaatggtcgggtccatccagcgcatcctggtcaccgactattcgaaaaaagacccgggcgaattgcaggggcgtaccgagaacaaccgaatcgtaaacttccgctgcgataatccgaccctgatcggccagtttgccgatgtgcatatcgatgcggcgcaaccgcactcgttgcgcggatcattgttgcaataatgacctgattaacagcgactcaatgtgggagggggcttgcccccgatgacggcgtgtcagacacagatgttttatctgaaccggcgctatcgggggcaagccccctcccacattttgaccgtgcaacattccgatgacgtaagtgctttcgcacacgggcagctggcgttattctctatttcacctcaacagccaaagggcggctaaaaacaaccttgaacgcacccatcgcagaaccccatcgttttctcctcgagccgtttgaggctcgccgtttcgccaatctgtgcggacagttcgacgagcacctgcgcctgatcgaacaacgcctgagcatcgagatccgcaatcgcggcaatcagttcgagctcattggtgaaccccaacacaccacgtccgcagaaaacctgctgcgccgcctctaccgtgaaaccaagggtagcgagctgtcgccggaaaccgtgcacctgtacctgcaggaatcggccgtggaagacctggccaacaaccccgtggccgaagccagcgtggccctgcgtaccaaaaaaggcatgattcgcccgcgcggcttgaatcagcagaagtacgtcaaggaaatcctcggcaacgatatcaacttcggcatcggccccgccggtaccggcaagacctacctggccgtggcctgcgcggtcgatgcgctggaacgcgagcaagtgcgccgcatcctgctggtacgcccggcggtcgaggctggcgagaagctcggcttcctgcccggcgacctggcccagaagatcgacccgtacctgcgcccgctctacgacgcactgtacgagatgcttggcttcgaatacgtggccaagctgatcgaacgccaggtgatcgagatcgccccgctggcctacatgcgcggccgcactttgaacaacagcttcatcatcctcgacgaaagccagaacaccacggtcgagcagatgaagatgttcctcacccgcatcggtttcggctccaccgccgtgatcaccggcgacatcacccaggtcgacctgcccaagggcactaagtcgggcctgggccaggtgatcgaggtgctcaaggatgtgccgggcatcagctttacgcacttcatgcccaaggatgtggttcgccacccgctggtacagcgcatcgtcgaggcctacgagcgtttcgagcaccgtgacgatgggttgtccaaggacgttcgccgcgatgcttgagctagacctgcagctggccaccgaagcgcccgcccccagtgaagcccagttccgtcagtggtgcgccctggccctgcgccagcgcagcgccgactcggaactgactattcgcctggtcgatgagcccgaaggccgcgaactgaaccacacctggcgccagaaggattacgcgaccaacgtgctgtccttccccgccgacgtgccggatgagctgctggatatcccgttgctgggcgacctggtcatctgtgtcgcggtggtggagcgcgaagcgaaggaacaaggcaaggaacttgaggcccactgggcccatctagtcatccacggctgcttgcatctcttgggttacgaccatatagacgatgacgaagccgaggaaatggaaacactggaacaaacgttgcttgcagaattgggtcatcgggacccgtatgccgacgacgaagcttaaaaacactcaactgtaacaataaaggattcagagtaatcgctatgagcgaagaccgatcgagcaacgggcagaagtcatggctgggtaaactgacccaggcttttgcccacgagccgaaaaaccgccaggagctgctggagctgctgcgcgaggcccatcagaacaagttgctggacagcgaagcgctggccattgtcgagggcgccatccaggtggctgacctgcaagtgcgggacatcatggtcccgcgctcgcagatgatcagcatcaaggcgacccagaccccacgggagttcctcccggccgtgatcgactcggcgcactcgcgctacccggtgatcggtgaaagccatgacgatgtcatgggcgtcctgctggccaaggacctgctgccgctgatcctcaaggagaacggcgacagcttcaacatcaaggacctgctgcgcccggcgaccttcgtgcctgaatccaagcgcctgaatgtgctgctgcgcgaattccgcgccaaccacaatcacatggccattgtgatcgacgaatacggcggcgtggccggcctggtcacgattgaagacgtgctggaacagatcgtcggcgatatcgaagacgaacacgacgtcgaagaagacagctacatcaagccactgcccagcggtgacttcctgatcaaggcgctgacgccgatcgagaacttcaacgagttcttcgacagcgaattttccgacgacgagttcgacaccgtcggtggcctggtgatgagtgcgtttggccacctgccaaaacgtaacgaaaccaccgagatcggcgcctatcgcttccgtatcctgaatgccgatagccgtcgcatccacttgatccgcttgacccctattgcccgctaaggactgacatgcgccgtctcaccgctcccggctggcccggtaatttgctggccgtggtggccggcgccatcactaccctggcgctggcgccgttcgacctgtggccgtttgcgctggtcgcggtcggcttgttctatgtggggctgcgggacctgagcccacaccaggccctgggtcgtggctggtgtttcggcttcggcctgtttggtgccggcaccagttggatctactacagcatccaccacttcggcggcgcttcggtgttgctggcggggttcctgatgctgttgttcaccgccgccatcgcctggttcttcgccctgcccgcctggctgtgggcgcgctggttgcgtcgcaatgaagcgccgctggcggatgccttgaccttcgcggcgttgtgggtcggccaggaggcgtttcgcggctggttccttaccggtttcccgtggctgtactccggctacagccaactcgacggccccctcaccggcctcgcgccgctgggcgggatgtggctgatctcctttgccctggcactcaccgccgccctgctgtgcaacctgccgcgcctgctggccggcaagcgcaacgcctttatcggtgccggcctggtgttgctggtcgcgccttgggcgatcggcctggcgctcaagcatcacgcctggaccagtccgtccggcgcgccgctgagcgtggccgccatccagggcaacgttgaacagagcatgaagtgggacccggagcagctcaacgcgcagctcgcgctgtatcgcgacatgagcttcagttccaagcgtgtcgatttgctggtatggccggaaacggcggtgccggtgctcaaggagtctgtcgaaggctacctgggcatgatgggcaagttcgccgccgaccggcacaccgcgctgatcaccggggtaccgatccgccaggaagtgcaccaccagaagcgctacttcaatggcatcaccgtggtcggcgaaggcgacggcacctacctcaagcagaaactggtgccgttcggtgagtacgtgccattgcaagacatgctgcgcggcctgattgccttcttcgacctgccgatgtcggacttcgcccgcggcccctcggaccaggcgatgctgcaggccaagggatatcagattgcgccgttcatttgctacgaagtggtgtacccggaattcgccgctggcctgtcggcgcagagcgatctgctgctgaccatcagcaacgacacctggttcggccgctccatcggcccgttgcagcacctgcaaatggcgcagatgcgcgcgctggaagccgggcgttggatgatccgcgccaccaacaatggcgtgaccggcctgatcaacccgttcgggcagatcaccgcgcagatcccgcaattcgagcgcggcattctctacggcgaagtggtgccgatgcacaacctcacgccgtacctgcaatggcgttcgtggccgttgattatcctgtgcctggggctgttcggttgggcgctgctggcgggccgcatgtccaaaaccgtctgacagacaacccaaaaccaatgtgggaggcggcttgcccccgatggctgtgtatcagtatcagatgtactgactgacactctgctatcgggggcaagccccctcccacatgttgatctgccgcgttatcggtagaacaaccgatagcccacctgccccaccgcttcgttgatcaactgcccgctgcgccacactgagacgaactccggcatccagccacccagtggcctggcgttgtccacgcccaggaaccccaccggcgccggcaccacggtaaagccggctctctcaaagctccacaccgaacgcggcatgtgccaggcctgggtcaccaccaccacgcgcttgatgccttcgggcaagagaatctctgcgctcatctgcgcgttttcccaggtagttcggctgcgctcttccttccagcgcaccgtcacaccgaagtcatcctgcatcgacaccgccatcagctccgcctcgctaggcggtgtgccgtaatgcaggccgccggtcgtcagcaccggcagcccggaggccttggccaatcgtgcggcatagcgctggcgctccaggccggtacccgtcggctggtcggtgccccaggccgggtcaccgcgctcacgcccggagcccaacaccacgatcgcatcggcgcgttgcgccagcgtcgaccaatcttcccgcgccaacggcggctcagtctccagggctcgtgcgccccactccaccatcaccggcaggctgatcagccacataccgccaaaccccagcgcaaagcagcaacccgccaagcgtggccggctacgccgaaaccaccaggcaagggcgagcagcagcaagagaatgccgggcggcaggagcagttgtttaatgaagtaacgaataggcatcgggcatctccaaagatgcccgaagcctaaggtgtaacggggtttagcgacaatctttaccgtgacatgacgcgaaggtgttgctctagggggagtgaactacttgtagcgtacgaagcggcgtttttccgggccgcgaccgaccgacaagtccttgagccacaccaccttggcagagtgcgtgggctccttgggtggcggggttgccaccagaggaggcgcaccgcgcccattccgctccagataagccttgatcagttccaactccgcgcgggtcaaaccgcgcagttccaactccacaggccgttcatcacgcaatcggcccgctgtcctcgctgcatccaatgcacgacccaatcggtcgatcagtccttcgtagatttccggtttcgttacgattcgctgcgattcaaccatcccctcacctcattgaagaaagacttgctccccaataaacagcgtagcccccgtggctgcgcctgcccggcgccgcgacagacggccctgccagagcaatcagggtttccctcgatagagtggggtcatgtatgctacggcgcttcctgtaactccacttcccgcagggtttgggcacggacgcgccgctttttggtgtcgatcaacctgaatgttgcaccgaagaggattaggccacccctattcagttcaaaagtagccatgcacgaacaatatcagccccgtgaaatagaaaatgccgcccaaaccttctgggacgagcaaaagtcctttgaagtcagtgaacagccaggcaaggagacttactactgcctatcgatgttcccttaccccagcggcaagctacacatggggcacgtgcgtaactacaccatcggcgacgtgatttcccgttaccagcgcatgcaaggcaagaacgtcctgcaacccatgggttgggatgccttcggcatgccggcggaaaacgccgcgatgaaaaacaacgtggcccccgccaagtggacctacgaaaacatcgcctacatgaagtcccagctgcgcagcctgggcctggcggtggactggtcccgcgaagtcaccacctgcaagccggattactaccgctgggaacaatggctgttcacccgtctgttcgaaaaaggcgtgatctacaaaaagagcggcaccgtgaactgggacccgatcgaccagaccgtccttgccaacgagcaagtgatcgacggtcgcggctggcgctccggcgcgctgatcgaaaagcgcgaaatcccgatgtactacttcaagatcaccgcctacgcggatgaactcttgtcgagcctcgacgacctgccgggctggccggaacaggtcaagaccatgcaacgcaactggatcggcaagtccaagggcatggaagtgcagttcccgtacaacgtcgactcgatcggcgcagcgggcgcactgaaagtcttcaccacccgtccggacaccctgatgggcgcgacctacgtcgccgtggctgccgaacacccgctggccacccaggctgcacagaacaaccctgagctgcaggcgttcatcgccgaatgcaaaggcggcagcgtggccgaagccgacgtcgccacccaggagaaaaaaggcctgccgactggcctgttcgtcgagcacccactcaccggtgaaaagctgccggtgtgggtcgccaactacgtgctgatgcactacggcgatggcgcagtaatggctgtgccggcccacgacgagcgtgatttcgaattcgccaccaagtacaacctgccgatcaagtccgtggtgcgcaccagctcgggcgacaccaacccggccccgtggcaagacgcctacggcgagcacggcacgctgatcaactccggcgagttcgacggcctggatttccagggtgctttcgacgccatcgaagttgcgctggtcaagaaaaaccttggtgcctcgcgcacccagttccgcctgcgcgactggggcatcagccgccagcgctactggggctgcccgatcccgatcatccactgtgaaagctgtggcgacgtgccagtgccggaagaccaactgccggtcgtcctgccggaagacgtggtgccggacggcgccggttcgccattggcgcgcatgcccgagttctacgagtgcagctgcccgaaatgcggcgcgcctgccaagcgtgaaaccgacaccatggacaccttcgtcgagtcctcgtggtactacgcccgctacgcctcgccgcactatgaaggcggtctggtagagaaatccgcggccgaccactggttgccggttgaccagtacatcggcggtatcgaacacgccatcctgcacctgctgtacgcgcgcttcttccacaagctgatgcgtgacgaaggcctggtgagctccgatgagccgttcaagaacctgctgactcagggcatggtggtcgccgagacttactatcgccgcgaagccaacggcgcttatacctggttcaacccggccgacgtcgagcttgagcgcgacagcaaagccaaggtcatcagcgccaagctgatcgccgacggcctgccggtggaaatcggcggcaccgagaagatggccaagtcgaagaacaacggcgtcgacccacagtcgatgatcgaccagttcggcgccgacacctgccgcctgttcatgatgttcgcctcgccgcccgacatgagcgccgaatggtccgactccggcgtcgaaggctcgcaccgtttcctcaagcgcgtctggcgcctggcgcacgctcatatcagccagggcctgccgggcaaactggacgtggccgccttgagcgacgagcagaaactcattcgccgcagcacccacctggccatcaagcaagccagccaggacgtgggtcagaaccacaagttcaacactgccatcgcccaggtaatgacgctgatgaacgtgctggaaaaagcaccacaagccactgagcaggatcgcgcactggtacaggaaggcctggaaacggtcaccctgctgctggcgccgatcacgccgcacatcagccacgacttgtggaaccgcctgggccacagcgacgccgtcatcgatgcgcgctggccggtacaggatgacagcgccctggtacaggacacgctgcaactggtgatccaggtcaacggcaaactgcgcggccagatcgacatgccggccactgccagccgcgaagacgtcgaggcggctgcccgcgtcaacgagaacgtgctgcgctttaccgaaggcttgacgatccgcaaagtgatcgtggtgcctggcaaactggtcaatatcgtcgcgagctaatcggatcgggcgcagggcgtaaaccctgcgtcgaacaaagccttcagggcctcgacaaggcccacatggtttcaaggggagcaacaaaatgattaaacgcaatttgctggtgatgggccttgccgtgctgctgagcgcttgcggcttccagctgcgtggtaccggcaccaatgacctgacgatcaaggaactcgacgtcagcgcccgcaacgcctacggcgatacggtgacgcagttacgtcaggtgctggaaaacagcggcgtgcacgtttataccggcgcgacgtacaaactgttcctggtggacgagcgagaaacccagcgtaacctgagctacgccagcgccgggcgtgcgtccgacatcgaactgaacactgcgctcaacttcgaaatccagggccgcgatcatctgccgctgatgggtgacaagatccaggtgcagaaagtggtcagccatgatggcaacaacctggtgggttcggactccgaaatccagcaagtgcgcaaggaaatgcgtcgcgaactggtacagcgcatggtgctgcgcctgtcgatgctgactccggaacaactggagaccctgcagcaacaggctgacaacaaggccaaggccgacgccgacgcgctgaaagctgccaaagagtacgaagacaacacgccgaaacagtcgcctgttgaagtccctgtcgagtaagccggacggggcgccccaaacgccccgtttaccctgcctatgaaactcgcccccgcccaactcgccaaacacctgcaaggtggccttgcgcctgtctacattgtcagcggtgatgatccgctgctgtgtcaggaagccgccgacgccattcgcactgcggcacgccagcaaggtttcgacgaacgccaagtcttcagcgccgacgccagcttcgactggggcacgctgctgcaggcgggtgcgagcatgtcgctgtttgccgagaagcgcctgctggaactgcgcctgccttcgggcaagcctggcgacaagggcgcggccgccctgatggaatactgctcgcgccccgccgaagacacggtattgttgatcagcctgcccaagcttgatggcagcgcgcagaaaaccaagtggggcaaggccctggtagaaggcgcacagacccagttcatccagatctggccggtggacagcagccagttgccgcaatggattcgccaacgcctgtcccaatcggggctgtcggcaacccaggacgcagtggagttgatcgccgcccgggttgaaggcaacttgctggccgctgcccaggagatcgaaaagctcaagctgatggccgaagacgggcagattaccgtcgagaccgtccagggcgccgtggccgatagcgcgcggttcgatgtgttcgggctggtggatgcgatcctcaacggcgaacccgctcacgccttgcgtatgctcgaaggcctgcgcggcgaaggcgtggagccgccggtgattctctgggccctggcccgtgaactgcgggtgctggccaatattgccctgcaatatagccagggtacgccgctggacaaatgcttcagccaggccaagccaccggtgtgggacaagcgcaaacccttgatgagcaaagcgctgcaacggcactcggcgcaacgctgggcacaattgctgctggaagcgcagcgcatcgacgcgcagatcaagggccaagccgctggttcgccttggatgagcctgagccgtttatcgttgctgatggccggccagcgcctgacattgccggcagaatagtcctacctctcgaagggctttacagcggcgcaacatcggcagatgatttgcaccgcttccaccacccaacgagagtaacgaccatgagcaaaaagccatccaagcatggccccaacaaggccaaatccatcatcgcccagccactgttccgcagccgtcaggaacgcgccggcaagggcaaaggcagctaccgccgcgaagccttccagtctaatagctgggaggcttcttactttctggctgcctgaaggcaagcagccctctggcatgataaggtctgcacctgatttgcaatccctggacctgtgcatgccctctagtctttcccgtcgttggcactttcgccaactgatcgctgcctccagcctcattctgctcgtcgcctgcgcggagaaacccaccgccgccgacgctcaaccgctgcccaagctccagaccgcccctgtggttgcgcccgccgtcgtggccccgctggccgtggacaatcttgatatccagccgacccagaccttcgccgaatggcaggcggccttccgcgtgcaagccctgcaggccggcatcaccgccgccgtattcgacaacgcatttgccaacgttacccccgacatggcggtgatccgcgccgaccgcagccagccggaattttcccgcccggtgtgggaatacctcgacggtgccctgtcgcccgtgcgcgtgcgcaacggccaggcgttgctggtcaagtacgccgacatcctgcaaagcatcgaacagcgttatggcgtcgaccgccaggcgctggtgtcggtgtggggcatggagagcaacttcggccagttccaaggcaacaactcggtgatccgctccctggcgaccctggcctacgaaggccgccgcccggcatttgcccaggcgcaactgctggcggcgctgcagatcatccagcacggcgatatccaggccgaccagatgaaaggctcctgggccggcgccatgggccagacccaatttatcccaaccacctacaacacccacgccgtcgacttcgatggcgacggtcgccgcgatatctggaacagcccggcagatgccctcgcctccaccgcgcactacctgcaaagctccggctggcagaaaggccagccgtggggttttgaggtgaaacaattgccggcgaacttcgactacgccctggccgatggcggcatccgcaagacggtcgcagaatggctgaaactgggcatccaactgccaccgggtgccagcctgccacccaacgtcgaccaactctccgctgccctgctgttaccggccggttatcgcggcccggcgttcctggtgctggataacttccgtgcgatcctcaagtacaacaactcgtcgtcctacgctttggcggtcggcctgctgtcggaacgtttcggtggcggcggcgtgattcgtggcgattggccgaaagatgaattgccattgagccgctcgcagcgcatcgacttgcagacggccttgagtgccaatggctatgacgcgggcaaccctgacgggattatcggcgccaatacgcgtaaggcgattcgtgcggcgcagcaggccttgggctggccggcggatgggtatccgacggtgaaactgctggagtcgttgcagagccgctagatcggcatatggcggctattgctatcgggggcaagccccctcccacatttcgacagcattccattgtgggagggggcttgcccccgatgacggcctgacaggtcgcaaaaactcaggctttgaacactacatcctgctccaacaccacccgctgctcccccgcatccaaccgcaccaacgcgcccatcggcaacgtcaggttcgggtcgcaatgcccactgcgccaaccggacaacacggggatgcacagcggctcgaaggtctgcttgagcaagcgctccaacgcaaccttatccacacccgccacgtcccctaccagtacaccggcgacctgcgccagcttgcctgccaggcgcaggtgcgtcagcaggcggtcgatgcggtagatcggctcgttgacgtcctcgatcaacaggatgatgccttctgcgtcgatctcaaagggtgtgcccatgactgccgcgatcatcgacaggttgccgcccagcaagcgcccacaggcgatgccaggctcgattgtggtcagcgggtacgccaccgggtgcatcaactcgctgccagcgcccaactggccgcgcagcaggctgaacaatgaagactcggtaggctgttgcttgtcgcccaacagatcggcgttgagcatcggcccgtggaaggtcacgaagccggcgtaacggctgattgccaggtgcagcgcggtgatgtcgctgtaacccacgaagggtttggcattggcgcgcagcaggtcgaagtccaggctatcgagcaggcgcggcgtgccgtacccaccacgcaggcagaagatggcgtcgatttcagggtcggcgaaagctttgtgcaggtcgttgaggcgggttttatcgctgccggcgaggtagccatcgcgttcatagacacccgggaagatgcgcaggtcgtagccgcgggcgcgcatccattggccggctttttcgacgtccagggtggcggggccggcgggggcgatcagggcgatggtgccttcgctacggagggcaggtactgcagcggtcatccacgactctccttggctaacgcgaaacaactgtgggaggaggcttgtccccgatggcggtgtatcagtatcagaagtgctgactgacagtccgctatcgggggcaagccccctcccacattaacctgcggtgccgctcacagcgctatcaggaaaccaggctcgccttgaccagcttggcctgctcgtccgcatggtacgaggagcgcaccagcgggcccgacgccacgttcttgaagcccatcttgtagccttcctcggcgaaccaggcgaaggtgtccgggtgcacgaaacgctgcaccggcaagtggctgcgggacggttgcaggtattggcccagggtcagcatgtcgatgtcgtgttcgcgcatgcgcttcatgacttcgatgacttcttcgtcggtctcgcccaggcccagcatcaggccggacttggtcgggatgtgcggcatcatctgcttgaatttctgcagcagggtcagcgaccactggtaatccgaacctggacgcgcagccttgtacaggcgtggcacggtttcgaggttgtggttgaacacatcaggcggctcggcggcggtgatttccagtgccacgtccatacggccacggtagtccgggaccagggtttcgagcatcacgttcggcgacagcttgcggatttcgcggatgcagtcggcaaagtgctgggcacccccgtcacgcaggtcgtcgcggtctaccgaggtgatcaccacgtacttgaggcgcaggtcggcgatggcgatggccaggctctccggctcgttgacgtccagtggcttcggacggccgtggccgacgtcgcagaacgggcagcgacgggtgcagatgtcacccatgatcatgaaggtggcggtgccgccggagaagcactcgcccaggttcgggcaggaggcttcttcgcacacgctgtgcagtttgtgcttgcgcagcagcgccttgatacggtcgacttccggcgaaaccgggatgcgcacgcggatccagtcgggtttcttcggcaattcggtggtcggaatgatcttcaccgggatgcgtgcaaccttctcggcgccgcgcagcttgacgccggcttccaccttggcacgcggggccggggctgggcgttcggtaacgtccaccgtcgggatcatggtttgcactgcatcagtagtcataatcagtcgattccgcccgtaagggtcgtctgctcagcatagtcgaggtgtttgacgagctgcgcacgcagccgggcacttacctcggcaaatttaatcggtgtggcgtggtcactcagttgcgtcattgccaacccggcatagccacacgggttgatccgccggaacggcgccaggtccatgtccacattcagggccaggccatgaaaggaacagccgtggcgaatccgcagccccagggaggcgattttcgcgccatcaacgtacacacccggcgcatccggcttggctgcggcgctcacgccgtaactggccagcagctcgatcaggcaagcctccatgcggctgaccaggtcgcgcacgccgaaccccagcttgcgcacatccagcagcaagtaggccaccagttgacccggcccatggtaagtcacttggccacctcggtcgacctgcaccaccggaatttcccccggcagcagcagatgttcggccttgccggcctggccctgggtgaacaccggcgggtgttccaccagccagatttcatcgggggccgaggtgccgcgctcgttggtgaagcgctgcatggcgtgccagacgggctcgtagtccatccggccgagctcgcgaaagcccaggacctgtgacatcacagcaccatgtgcacgaagccggtggcccgcagttcactgttgatgttgtagagctggtcctgatccgtcgcaacgatgtgcaactggatcgtggtgtatttgccggttgaactggagcgttcatccacgcgctgatcgttgatcgtggcgtgtttacgcacgatctcaaggatcaggtctttacggccgacaccggtatcgctgatcaccttgatgggatagtccaccaccgggaattcgatctttggcgcctttacttctttatcggtcatggcgtaacggcctcgtaagcgtaagccgtggcgacgggcaaagccccgtgtcggatcaacacggggctttgcaggtgcacacaatcagttgaacaggctgtagaagaatagacggatgctatcccacacgcggcggaagataccaccttcgtcgacagcgtccagggcgatcaggtcggcgctgtgcaccaccttgtcgtccagcttcacttcgactttaccgatcacgtcgcccttggcgatgggcgcaaccagttgcgggttcatggtcatgctggcagcgagcttcttcagctggcctttaggcatggtcagggtcaggtcttcagccaggccagccttgacttgagaggtcgcgcctttccacaccggcgcggtcgccagttcagcacccttctggtagaaggtctgggtttcgaagaaacggaaaccgtaggtcagcagcttttgcgtctcggccgcacgggcctgttcgctgttggtgccgaagaccacggcaatcaggcgctggccgtcacggacagcggacgacaccatgcagtaaccggcttcttcggtgtggccggttttcagaccatcgacggtcttgtcgcgccacagcagcaggttgcggttaggctgcttgatgttgttccagaagaattccttctgggagtagatcgcgtagtgcaccgggtcgacacgaatgatcgcgcgcgccaggatcgccatgtcgtgagccgacgagtagtgctccgggttcggcaggccggtcgggttcatgaagtggctgttggtcatgcccaggtcggccacggttttgttcatcatgtcggcgaatgcatcttcgctgccggcgatgtgctcggccagcgcgacgctggcatcgttaccggactggatgatgatgccgtgcaacaggtcgctcacagtcacctgcgaacccaccttgatgaacatccgcgaaccgccggtacgccaggcgttttcgctgacggtgaccgggtcgttctcgccgatctggccgcgacggatttccagggtcgcgatgtaggcggtcatcagtttggtcaggctggccggtggcaggcgctggtcaccgttgttctcgaccagcacgttgccgctggcggcatccatgaggacccaggccttggcagccagttgcggggaagccggcaccatttcaaccgcccaggcggccggggtgatgatcagcgaaagaagcaggcacgtgcgtttggctaaggtggtgatgttcatccgtctctcgaaattgcttatggaaacttgccctcgcgggcaaaacttattcagacagcccgctaccagactgtcacgtgttcggttgcccgctcaccccttgcccccgggtttttattgttcaacgagccaacaaccagggttcaagcccgcgcacgggccagaaccatcaattctgttttattcagcggtgaccacgctaggctgacccagattggccaggcgcacgctgttctgcacttgcgccacttcgctcggcgagccgatcgggcccatgcgcacacggtgcaacgtctgctggttacgcacgatggagctgatgaacaccggcgcgctgaccatgctgctgagcttggaccttaacagttctgccgcatccgggttggcgaaagcgcccacctgcaagtattggccaccggccagcgaagcaccctgggcagcctgcggcactgccacggtgtccggggcgtgctgttgtggcggcggtgtccactgctcgaccttgcccgccgatgcggtgatttgcggttgtggtgtctgcggctcgttgagcatcaatggcgccggcttgccgcgctgggcccagtactgcgccgggtcgatgccttcgaccttgacccgtgcggtgccggtttcggcgtagccgagtttcttcgcggcggcgtaggacaggtcgatgatgcggtccgagtaaaacggcccacggtcgttgacgcgcaggatcaccgtgcggttattgtccaggttggtcacccgcacataactcggcagcggcaacgtcttgtgcgcggcactcatgccatacaggtcatacacttcgccattggcggtgttctggccgtggaacttggtgccgtaccaggacgccgtgcccgattgcacgtaggtcttggattcctgcagcgggaaataggtcttgcccagcacggtgtacgggttggccttgtaggcaccggtgtgcagggtgggcgtggcgtccgggatcttcgacacatcgacatcccaccacggcgctccgtctttgtgcgcacggttgatgtccaggcccggctgggaacgaactgcggtgcccccggacttctgcgccggaccgcggctggtggagcaactgacgaccagcagggacaacgcgacgaacgccaccagcttgagcggttgattgaacggcgatgcccgcattacttagtgccccgtgcttggaccagcatgtctgacagctgatgtacggccatggcgtacatcacactgcggttataacgcgtgattgcgtagaaattcttcaggcccatccagtattccgggccgttttcgccctcaaggcggaatgccgtgaccggcatctcgtcaggcagcgcattctgactcgaccagcccagcgcccgcaactccccgaccgtcttggccggctcgatgccctgcgtcaggccttcgtcggcgcgatcgcccgtgacatccgcacgtatcaccaccggctcaccggcgacccagccatggcgcttgaagtagctggccacgctgccgatggcgtcgtcggggttgctccagatattgatatgcccgtcgccgtcaaaatccaccgcataggcgcggaagctgcttggcatgaactgcggcaagcccatcgcaccggcgtaggagcccttgagggtcagcggatcgacctgctcttcacgggccaacagcaggaattcgcgcagttccttgcggaagaactcggcgcggggcgggtaatcgaagcccagggtcgacaaggcgtcgatcacccggtagctgccggtattgcgcccgtagaaggtttcaatgccgatgatcgcaacgatgacctgggccggtacgccgtactcttgctcggcgcgggccagcactgcctcatgctggcgccagaagtccacaccacgggccacgcgggcgtcggtgaggaacatcgggcgatattccttccactgcttcacacgctcagcggggcgcgaaatggcgtcgaggatcgcctgctttttctgggcttcgcggaacacacccatcagctgttcaccggcgaaaccatagtcgcgggtcatctcaccgacaaactcggcgacctggggtgaaccatcgtagtcaccggcctgcgcctcttgcgttgcgcccagcagcccaatcaggcccatccaggacgcgtgccgagtcgcccagccgcgcattacttgcattgacatcttcaccttattcaaacctgtgcgatccatttgcgatgcgtatgaatcgacatcaaaaccccaaacgctgacagcaatgtcaccagcgaagttccgccgtagctaatgaatggcaacggcaccccaaccaccggcaacaggccactgaccataccgatgttgacgaaaacgtaaacaaaaaaagtcatggtcagggcgccggcgagcaatttgccgaacagcgtctgcgcctgcgcggtgatcaccaggccgcgaccaatcaacagcagatagatcagcaacagcgcgcaaatgcctaccaggccgaactcttcgcccatcaccgcaataatgaagtcggtgtggctctcgggcaaaaagtccaggtgcgactgggtacccagtaaccagcccttaccaaatacgccgccggaaccgatggcggccttcgactggatgatgttccagccggtgcccaacggatcgctttccgggtcgaggaacgtgagaattcgctgcttctggtagtcgtgcataaagaagaaccacatggccacggccaccggcaccgcggcagcgagcacgctgaggatccagcgccagcgcaggccgcccatgaacagcacgaacgcaccaccggccaggatcagcagcgaggtgcccaggtccggctggcgcacgatcaggatgaacggcacgccaatcaggatcaggctgatccccacgtgcttgagttgcggcggcaaggtgcgcttggacaggtaccaggcgatggtcgccggcatcaggatcttcatgaattccgacggctggaagcgaatcacccccggaatgttgatccagcgggtcgcgcccatggcgttgtggcccatcacgtccaccaccaccagcagcaacaccccggcgacgtagcccaacggcacccagcgcgccatgaaacgcggctccagttgggcgatcaccaccatcgacaacaagcccaggccaaacgaagacgcctgcttgatcagcaggtcccagttcttgccgctggccgagtacaggacgaacaggctaccggccgccagggtcagcagcaggatcagcaacgggccgtcaatgtgcatgcgttgcagcaacgtcgcgcggcgacgcatcacatcctcactggagaggatgcggtcaaaattactcttcacgggccgtaacctcggtgcttgaagggggcccgccgtattcgggcttgagcctgccgtcgtcggccaacagccaggcgtccattacttggcgcaccacgggcgccgcgacgccggagccggactcgccgttctcgaccatcaccgccaccacgatcttcgggtcgtccgccggggcaaagccgacaaacaaggcgtggtcgcggtggcgctcctggaccttggagcggtcatatttttcgccctgcttgatcgccaccacctgggcggtaccgctcttgccggcaatgcggtactgcgcgccgatggccgccttgcgcgcggtgccgcgtgcgccgtgcatcacttgctgcatgccgtggttgaccttggtccagtcggacgggtcgcgcagtacgatgtccgggatcgggttttcatccagaggcttctcgccctcgatggtcttggccaggtgtggacggttccagatgcctttgttggcgaccaacgccgtggcctgcgccagttgcaacggcgtggcctgcatgtagccctggccgataccgaggatcagggtttcgcctgggaaccacgcctggcggcgggtcgcgcgcttccactcccgcgacggcatcaggccgggggactcttcgaacatgtccagcgagaccttctggccaaggccgaacttgcccatgtaagcggacaggcgatcgatcccgagcttgtgggccaggtcgtaaaaataagtgtcgttggagcgcatgatcgcggtgtccaggtcgacatagccgtcaccggtgcggttccagttacggtatttgtgatcgtagttgggcagcatgtagtagcccgggtcgaacacgcggctggaggccgtgaccacacctgcgtccagtccggcaatcgccaccgccggcttgatggtcgagcccggcggatacaggccgcgcaacacgcggttgaacagcggccgatcgatggaatcacgcaactcggcgtaggccttgaagctgatcccggtcacaaacagattggggtcgaaactcggctggctgaccatcgccaggacttcgccggtagtcgggtccagggcaaccaccgcgccgcgccgcccgcccagggccatctccgccgcttcctgcagcttgatgtccaggctcagcacgatgtccttgcccggcaccgggtcggtacgcttgagcacccgcagcacgcggccacgggcgttggtctcgacttcctcgtaacccacctgaccgtgcaactcgggctcgtagaaacgctcgatgccggtcttgccgatatggtgggtgccgctgtaattcaccggatcgagggttttcagctctttctcgttgatccgccccatgtagccaacggagtgggcaaagtgtggcccttgcgggtaatgccgcaccaactgcgccaccacttccacacccggcagacgaaactggttcaccgcaatccgcgcgatctgctcttcggtcagctcgaacaggatcggcaccggctcgaaaggccggcgcccctgtttcatgcgtttctcgaagatcacccggtcttccggcgtcagttgcagtacctcgacaatcacatcgaggatctgctgccagtcgccggaacgctcgcgggtcatgctcaggctgaagctgggccggttgtccgccaccaccacgccattacggtcgaaaatcagcccacgggtcggcgggatcggctgcacatgcacccggttgttttccgatagcgtggagtgatagtcgtactggatcacctgcaggaaatacaggcgggcgatcagcacgcccaacaacgccaccaccatgattgcgccaaacaccacgcgtgcgcgtacgagacgtgcgtctttctcgtggtccttgatgcggatcggttgggtcatcgggaggggcgcagattatttgtggtaagggtgcccggacaggactgtccaggcgcgatacagctgttcaccgatcaggatccttaccaacgggtgcggcagcgtcaacgccgacagcgaccaacgctggtccgcccgcgcgcagacttccggcgccagcccttcggggccaccgaccatgaagttgaccgtacgcgagtccaggcgccagcgatccagttccaccgccagttgctcggtgctccagggcttgccgtgcacttcgagggtgacgatgcgctcgttggggccgaccttggccaacatggcttcgccttcctgacggataaagcgcgccacatcggcattcttgccccgggtattgagcggtatctctaccagttccagcgacagctcagcgggcagacgcttggcatactcgtgccagccttcttccacccacttgggcatacgtgaaccgacagcaatcagacgcaggcgcacagccgttccttattcctggtctttgttgagcttgtcgaagtgcgcgtggcccacttccgggctgtggtgcttgccatcggcggcacggctctgctcggcgcctttccacagacgctccaggtcgtagaactggcgggcgttggaagtcatcatgtgaacgatcacgtcgtccatgtccagcaacacccagtcgctgtcgcccttgccttcttcacccagcggcttcacgccctgggctttgacggcttcacggactttatcgagcatcgcgccgatctgacggttcgaggtaccggtggcgataatcatgaagtcggtgatgctttgcttgtcgcgcacgtccagcacctggatgtcctgggctttaacgtcctccagggcagccaccgcgacctttaccagctcttcgccagccagttccgggcctacgtgggcttcaaccggcagcggcgcgcttttgaaggtgcctttgcgcttaactttgcttacgtctttgttcgtcatataaaactcgttttgctcgtatgttcgggcgcttgctgcacgaattttcgtacgttcaagcgcgccttttcagttcgacgcacggtaaagcccgtgcgcatcgatgtaggccaggaccgcgtcaggcaccaggaaacgtaccgacttcccgctggccagcagttgacggatctgggtggcggacaccgcaagcggggtctgccagacgaatgcaatattcccgttcggcccggtcagggccaaggggtcacttaccgaccgcgcggccagcaggttgcgcaaggcatccggcggttcgctgtcggcatccgggcgttgcagaaccaggatgtggcaatgctggaggagttcctcccagcgatgccaagagggcaggccgcaaaaagcgtcccagcccagaagcaaaaacaactggtcatccgcggccaactcggcacgcatcagctccagggtgtcaacagtgtaggacggtttgtcgcgcttgagctcgcggtcgtccaccaccagcggcgctatgccttccaccgccaggcgcaccatctccaggcgttgctgcggcgacacctgcggcgtatcgcgatgaggcggccgcgcgttgggcatcacgcgcagctcgtccagcgcgagggcatccgcgacttccagggcactgcgcaaatggccgatgtgcacggggtcgaaggtaccgccgagcagcccgatgcgtttacccatcaagtgcgcacatgaccgtcgccgaacaccacgtacttctcgctggtcaggccttccagcccgaccgggccacgggcgtgaagcttgtcggtggaaatcccgatctccgcgcccaggccgtattcgaagccgtcggcaaaacgcgtcgaggcgttgatcatcaccgaagcggaatccacttcgttgaggaagcgccgcgcatcgctgaaatgctcggagacgatggcgtcggtgtgcttggagccgtaggtgttgatgtgctcgatggcttcgtcgaggtcatcgacgatcttgatcgacaggatcggcgcggtgtattcggtgtaccagtccagctcggtcgcctcgatcacgtccgcgcccagcagcgcacgggtgcgctcgcaaccgcgcagttcaacgcccttgtcgcggtagatggcagccagcggcggtagcacgcgctcggcaatgccgacgtgcaccagcagggtttccatggtgttgcatggggcgtagcggtgggtcttggcgttgtcggcgatgcggatcgccttgtcgatgtcggcggcgatgtcgatgtacacgtggcacacgccgtccaggtgcttgatcacaggcaccttggcatcgcggctgacgcgttcgatcaggctcttgccaccgcgcgggacgatcacgtcgacgaattccggcatggtgatcagcgcgcccacggcggcgcggtcggtggtttccaccacttgcaccacttcggcgggcaactcggccacggccaggccctgctggatgcaggccgcgatggcacggttggaattgatcgcctcggaaccgccgcgcaggatggtggcattgccggacttgaggcacaggcttgcggcgtcgatggtcacgttcggacgcgactcataaatgatgccgatcacgcccaggggcacgcgcatcttgccgacctggatgccggacggcaggtaacgcatgtcgcggatttcaccgatggggtcaggcagcttggccacctgacgcaggccttcgatcatgtcgtcgatacgtgtcggggtcagtgccaggcggtccagcagcgccggctccaggccattggcgcggccattggcaaggtccagttcgttggcggcgccgagctcggagcgcgaagcatccagagcatcggcggcggccagcagggcacggttcttctgcgcagtgctcgcacgggcgatcaaccgcgaggcctgacgggcagcgcgacccaggcgggtcatgtagtcaagaacggactcagtcatggtcagggagtcttggcagggaggaaagcggcagattatagctgtgacgccgcccgactgacagcggtgaggggcggatggtcgaaatgaactgtaaaaacctggggttcagcggtaattaaggcgggagttgttatgattccgtcacatttagccgtatttaccctgaccgccatgcccagttcatcaccccgactccccgccagcgccctgcccgactgcttcttcgaccgtgacgcgcaaatgcttgcgcaggaactgctcgggaaagtcatccgccaccgcgtcggcgaaacctggctttcggcgcgaattatcgaaaccgaagcctattacgtggcggaaaaaggcagtcacgcttcattgggctacacagaaaagcgtaaggctttgtttctggatggcgggcatatctacatgtactacgcccgcggtggcgattcgctgaacttcagcgcccatgggccaggcaatgccgtgttgatcaaatcggcctatccatgggtcgatgaattatccagcccggcgagcctggcgcagatgttgttgaacaacccgaaccccgacggcagcccccgcacctcacaaaaactgtgcgccggccagaccctgctgtgtaaggccctggggttgaaagtgccggcatgggatgccaagcgcttcgatcaggaacggctctacgtggaggatgtggggcagaccccggcccagatcatccagaccacccgcctgggaatccccagcggccgcgatgaatacctgatgtaccgcttcgtcgatgctggctacgcgccttattgcacgcggaacccgctgcgccggggccaggtcgaaggccgcgattattttttgatttgagcagggagtggattgtatgagccaatggctcgatagcattaccggctggttgaccctgaaccccgaatggctggcggtcgcggtgtttatcgtcgcctgtgtggagtgcctggctatcgccgggctgatcgtgccgggcacggtattgttgtttgccattgccgccctcgccggcagcggcgcgctgtcactgagcgaaaccctgttgctgggtttcctcggcggcttgctgggcgacggggtttcctactacctggggcgacatttccaccagaacatccggcgcttgcctggcttgcgtcatcaccctgaatggatgaacggcgccgaaacctacttccacaagtacggcattgccagcctgctggtcgggcgcttcatcggcccgctgcggcccatgctgccaatggtggtaggcatgtgcgacatgcccttcccgcgttttgcgatggtcagcatcgtggcggcggcgggctggtcggtggcgtatctgctgccaggctgggcaaccggcgccgcgttccgcctgccattgccggagggtttctggcctgaagcgggggtggtagccgcctgtatcgcggtggtggtgggcctgagcttgaacagcagcctgcgcggccatcggcgtgccaccctatggatcggttgcgccagcctgacgatgttgatcgccttgtttatcggctacccccatctcaacgattttgaccagggcctgagcgccctggtgcaggaacaccgcagcgcctggctggacgaagtgatggtgcgcatcacccaactgggcgagttcaagaagatgttcgtcgccagcgccgtgtttaccggcttgctgctagtggctcgacaatggcgccatgcgctgtttgtcggcgcgaccctcgccggtgcggcagtgatcaacaccgggaccaagctgtttttcgcccgtggccgcccggaaatcctcacagacccactgaccagtttcagcatgcccagcggccatgcatccggcgcgtttgcgtttttcctggccctggcggtcctggccgggcgcgggcaacccatccggctacgcctgacctggatgttgctgggctgcattcccgccgcgttcattgcgttgtcgcgggtctacctcggcgcgcattggccctcggacatcctggccggcacgctgctggcgatgacggtatgtgcgttcagcctgggggtcagccagtaccgcagcccgctaccggcgatgccgcaaaaagcctggtggctgttgctgccagcattggtggcggtgctcagcttcatcgccctcaccggcacgccccacgcgctgctgcgttacgcctattaagtgaacagctcgccctgcaactcatcgagcagcatctggatcgcatccaggcgctgctgcgggtcatcgagttgcaacagatcgatcttgtcggcctcggtgaagggcagcagatacgccagctgattgcccaaggcttgctgaccgtcggcgtgggcgtccatgtccagcgaggccaccatcgggtgctcggccaacgcctggagcaatgccagcaggtcggcgtcctcttcttccagcggttggtccggcagttcttcgagccactgcacatcggccaccagcagttggtctttctgcacgccggcgtcgcgcacccggaaccggcgaccaccttcgacacgaatccccagcaggccattgtcctgctgcttgaagtcgcgaatcagcgcttcacagccgatcagcgcgtaaccgtccggggccaggcccacttccttgccgtcgaggatgcacaccacgccgaagctttcgccctttttcatgcagcgggcgaccatatccagatagcgcgcctcgaacagttgcaggtcgagggtgcagcctgggaacagcacggtattgagcgggaacagcgccagactcataaaggtttccttaaccctggtttaaacgatcaccgacacagccagcggcaggaacactgccgtggccacgcccatcagactcatggccagcgccgcaaaggcgccgcactcttcgctttcctgcaacgccaccgaggtgccgaccgcgtgggcggtcatgcccagggccatgcctcgcgcctcagggctgtgcacgcccaggcgcgacaggtacgccgggccgatcatcgcgccgatcaccccggtgatcagtacaaacaccgccgccaatgccgccacaccaccgatctgctcggccaccagcatggcgatcggtgaggtcaccgacttgggcgccatggtcatcaacatcctatgttcggcgccaaaccaccagcccaacagtacacacaggccggtggccaacaccccgcctatcaccagcgtagtaaaaatcggccagaacaattggcgaatacgccgcaggttcaaatagagcggcaccgccagggccaccgtcgccgggcccaacaggatgcccatgatctcggtgctcttgcggtactcggcgtagctcaggccacagctgatcagcacgccgatcaccagcagcatggaaaccagcaccggttgcaggaaaatccagcgggttttctcgaaaccggccagtaccagttgataggcacccagggtgatgccaatgccgaacaacgggtgatggatcaccgccatccaggcgccctgccagtcgacggtcattggtccttctccttgcgcttgaccatctgctgcatcagtacgccgacaaagcccatggcaatcaccagcgataacaccagcgcgccgacgatggcccagaagtccgcagcgatgtccttggcgtacaccatcacgcccaccgccggcggcaccagcagcaacggcaggtaacgcaacaggctgctggcggccaggctcaatggctcgccgacctcgccgcgccagaccagaaaacccagcatcagcagcagcccgatgatcggccccggcagcaccggcaccagcaaatgattgatcgcggtgccgatcaattgaaacagcaccagccaggtcaggccccgtaacagcatccgttcttccccctcgaaactcgcccgcattataagcatgcccgccctatgcatcggcattcgccaaaagcatggtgggttgaccgggccgattggccatgatgatctacattggttctctgtaacccataaaaaacacgccctgcagggcggcaaaaatgatgaaccaaggagagacgcaatgccctatgtacccgtagcgcagctcaaagactatgtcggcaaggaactgggacgttccgaatggctcactatcgaccaggcacgcatcaacctgttcgccgaggcaacgggcgatcatcagttcatccacgtcgacccggtcaaggccgcgcaaaccccgttcggcagcaccatcgcccacggtttcctgtcgctgtcgctgatgcccaagctgatggaagacattctgatcatgcccgaaggcctgaagatggcggtcaactatggcctcgacagcgtgcgcttcatccagccggtgaaggtcaattccaaggtgcgcctgaacgtgaccctgaccgatgtcaccgagaagaagccaggccagtggctgttcaaggccaccgccagcctggaaatcgaaggccaggaaaaaccggcttacattgccgagtcgttgtcactctgcttcgtataaggccgtgcctgtggtggggaaataaacctcaccacagggtatgtaaatttatgtatgaaactcgcagctgcggcatactcggcgctcaattatccggatcccgctatgcgcccactcgctcccctcgcccttgccctgttgctcaccgcttgcggagacggcgaatcgctgttgccgcccgatgcgcgcctgcccgatggcggccgctaccggggtgatgtggtcgatggcttgctgcagggccagggccgcgtggactaccccaatggcagttggtacgccggccagttcgacaagggccagtggcacggccagggcgaatggcatggcagcaacggcgaagtctataaaggccagttccagcaaggcctgttcgatggccagggcagcctgaccacggcgggcagccactatgtgggcggcttcaagaatggtcgacgcaacggcgaaggcaccctcaaagaggggcagatgacctaccgcggcgaattcaagaacgaccagtattccggcctcggtcgcctggagctggcggacggcagccagtaccagggccagttcgcccacggcaaaccgaatggcgaaggccagcgcaacgacgacagcggcaaccagttcagcggccatttcgtcgatggccaattggaaggcaacggcaccttcaacagcgccgatggcgacatctatgtcggccagttcaagcagaaccaactcaacggcaagggccgctacgagaacgccgacggcgatgtgtggatcggccagttcaaggaaggcgcgctcagcggcaagggcgagttgataggtgtggatggcagccactacgtcggccagttcgctgattggcgctttaccggcgaaggccgcctgaacctcaccgacggtagcttctatatcggcggtttcgacagcgacagctatcaaggcaaaggcaccctggtgctcaccgatggcaccgtgcaggccggcacctgggtcaatggcatgcgtgtacgtgatgccgacggcaaactgctgcccgacccattggaaatcggcgtgctggcccaaggccgcctgctggatgctgccctcgccgccgtgcccgcctccacccccgccgtggagctgtacaccctggctgtggctggcgacggtaaacaaagcgtgttcctgcgcgaagccgattacgtcagcaacatgctcgccacccgcttcggcgcacgcgggcagattcgcctggtcaaccaccgcgatcacatcaccgaccgccccctggccacccgcgaaagcttgcgtcgcgccgtgcaaaccctggccgagcgcaccggcccggaagacctggtgttcatctacatgaccagccacggcacccacgaacacgaactggtgctggaccaaccgcgcatggagctggccgacctgccagctgatgagctggcggccgtgctggcgccgctgaagaaccgcgacaagatcgtggtgatttcggcctgctactccggcggattcatcccggccctgaaggatgagcacacgctgatcatgaccgcctcccgggccgaccgcgtgtctttcggctgctccgaggaagccgacttcacctacttcggcgacgccctcttcgcccaagccctcaaccagaccgacgacttgcagcaagccttcaagctggcgcaactgcatgtggccgaacgcgaacaggcggacaacttcgaagcctccgaaccgcagatctgggcccccaagggtgtgatcgcccattggcaattattacgcaaacagcaggcacgaaaggcgctggaaagcgtctcaatgaatagcaaggaagccaaaggcaactaagctgtaacgtgtaacaagggggaaacaccatgtacctgacgcctcagcatatcttgctcgccggagccaccggccttaccggcgaacacctgctcgaccgcctgctcaacgaacccaccgtgacccgcgtgctcgcacccagccgcaagccgctggccgaacacccgcatttggaaaacccggtgggcgacccagcggtgttcttgccgcaactgagcggccgggtggatatcgccttctgctgcctgggcaccaccatcaaacaagccggttccgaagccgcctttcgcgcggttgacctggacatggtcgtggccttcgccaagcgcgcgcgggaaatgggcgcacggcacctgatcgtgatcagcgcaatcggcgccgacccgaaatcctcggtgttctacaaccgggtcaagggggaaatggaacaagccttgagggcgcaggactggccacaactgactatcgtgcggccatcgttgttgctgggagaacgcttggaaccgcgcctggcggagcaactggcagggccgctgtcgcggttgatcccgggcaaataccgcggcattgaagtgtgcgaactggcccgcgccatgtggcgcctggcgctggaagaacaggatggggtgcgggtggtggagtcggacgagttgcgcaagctaggcaagtagttttgtggtgaacagaagggcgtcatcgcaggcaagccagctcccacatttggaatgcgttccctgtgggagccgggcttgcccgcgatgaggccagcacagccacttgtcatttaaagaccacccgtagcgttgaagccaacgccaagtaccgtcaacaccgacagcggcaacaacaaagtatcgagcaccgcactcgccggcagatccaccccaggataactcggcgcctcggcaccaaacctgtccttggcgcagcagccgccattcattgcatacaaatccaaccgcgtgccggcatacaccaccggcgcacccggttgcgccgcgtccaacgtacgcgcggtggcgcagcccgtcagttgcagcgccagcaggaccaacagcgccttattcatcgctgctcaaatggtgctcgccccaacgtggcagcatgtcctggggaatgttcaacaggttgagaatgcgtgccaccacaaagtcgaccaggtcatcgatggtctgcggctggtgatagaaacccggcgaggccggcagaatggtcacgcccatgttcgacaacttgagcatgtgttccaggtgaatactggagtaaggcgcctcacggggcaccagaatcaactggcggcgctctttcaaggtcacgtccgccgcccgttcgatcaggttgttgcaggcccccgtggcaatcgccgacaaggtgcccgtggaacacggcaccaccaccatcgccgctggcgcgccggagccggacgccaccggcgacatccagtcctctttgccgtagaccttgatctgccccgccgccgcaccggtgtactcggtgaggaacgcctgcatggtctgcaccttgggtggcagcgccacgtcggtctcggtggccatcaccaactgcgcggccttggagatcaggaagtgcacctcgcggtcttcacgtaccagacagtccaacaggcgcaagccatagggcgcgccagatgcgccggtcatcgccagggtgacgcgctccggcccgctcatttcagcgcctcggccagcttgccatgcaggccgccaaagccgccgttgctcatgaccaccacatgggtgcccggcttcgcttgatgcttgacgtgttcaatgatgccttcgatggagtcgcagacgatggacggcaccgtgcacagggctgcaattgccggcaggtcccagccgaggttggccggtgcgtaccagaccacctggtcggcgtcgttgacgctttccggcaggccgtcgcggtgtgcaccaagcttcatcgagttggagcgcggctcgacaatcgcaatgatcggcgcatcgccgacgcgcttgcgcaggccatccagggtggtggcaatcgccgtagggtggtgggcaaagtcgtcgtagatggtaatcccattcacatcggcgactttttccatacgccgcttcacactcttgaacgcactcaatgcggcaatgcccatggacggcaccacgcctacatgccgcgcagccgccagggtcaccaaggcgttggcagcgttatgctggccggtcatgtcccactcgacgatgccctgggcttcaccttcgaacagcacttcaaagcgcgaaccatcttcactgagtaacttgacctgccactgcccgcccgcgccggtggtttgtaccggggtccagcaacccatctcgatcacgcgctgcaaggccggctcggtggtggggtggatcaccaggccttcgctgggaatggtccgcaccaagtggtggaactggcgctcgatggccgccaggtcagggaagatgtcggcgtgatcgaactcgaggttgttcaagatcgcggtgcgcgggcggtagtgaacgaacttggagcgtttgtcgaagaaggcgctgtcgtattcatccgcctcgatcacgaagaacggcgtgtcgcccaggcgggccgacaccgagaagttctgcggcacgccgccgatcaggaaacccgggctcatgcccgcgtgctccagcacccaggccagcatgctactggtggtggtcttgccgtgggtgccggcgaccgccaatacccaacggccttgcaatacatggtcggccagccactgcgggccagacacataaggcaaacctttattaaggacgtattcgaccgccgggttgccacgggacatggcattgccgatcaccacgaggtccgggaccgggtcgaattgcgccgtgtcgtagccttgggtcagctcgataccctgggcctcgagttgcgtactcatgggcggatagacgttggcgtcggagccggtgacgtgatggcccagttctttggccagaaccgccatcgagcccatgaatgtgccgcaaataccgagaatatgaatgtgcatagtcgacctcgtaaaacatcgaggcaggttagcgcagggacggggaaatcgcactctttaggtgagccgcccacgctatgcggcggcttgcctatgccgtgtcgacacctgcgtcagcgcgtcacgtatggcagctattttttctcaattgtgttcagtcgatccgcaacgtccccgttgccttgactcacggagtcttcgtgtttgtacggtttgaagaaaacctcataagcctgtgcaagatcaatggtgagttcctcaagcaactccacgaaagcctccaactgatcgacggcctgcagcggttcgctggaccatttcgggatgtccaccacaacacccggcatcaattgcaaaaacaacttacccaactcactggcgccctgcgttgcagcgtcgacgcgagctcgaagggcagggtcaacgggttcaactgccgggcccaggtctgcaactctacgtcgccggggttaataccgccgtcaggagcagcaggacgctcatagtggttttgaagagctttttgcacctaaatgacagctgccacaatgccagcatcggtcaccgcttccattgcccagcgcttgacctgaccgacaaaagcgcaagcagaggactggacaaagtccttcaatggcgcaccgtatggcgtttgggtcgcagggtcgaaggcataccattttccgttgcgctccacggcaacgacgggaaccgcatcgctattagcgcccaacggcctgtagaggccttggaccccgccttttaaccccggaataaaaaagccaaacacatccagcactaaattgaaaaagccttcagcgggcctgcccttaataaaactttcaaccgcactgtagaaaggaatcaggcttaaaaagaacgccttgacggcctgtgagcgcgcgctttcccgctcttgctctgtgctgccattggccgttgctttcgcctcatccaaacctcgcgtgaaataagcaccgacagcgactgacagttcatcggttttagacgagaaaaaagtcgtcggcggggcgagatgctctccgggtataccggcctccaacgatttggaggtatagatacgataggcggaaaagtccaccgggtcgtttttcggcgatgtactaccgactgcctgccacaggatagtgaccggtggtgctttaccgcccggcgaatcaggcagcgacatggagaagtacaaacgagagcctggaaactgcaggccgggcctggaagggtcggcatccttgatgattcggccctgcgctggtgaatacagataatgacaaaccttcccatcacgttcagccctgataagtaccgcgccgctgcctatatacgcttgaattttatgatcggcgctgacagggccctgattggcactgggcgtctggagagagaatgtcgtgaccttgccgtattcaatcagccgccgatcttcgagcgggagcaatgagagttgatacttaaactgcgcggcaaaaccgtccttgagcccttggatgtatttgtcgaagctttcatcaaactgctgcttgatgtttggcaacttcggaaaacccaaattcactttctcggtattgaagtcagggtggctggatatccagaagtgcttatccagatcacctgacatgtaagtatccagcagcgaataggcttttcggccgggcgaccccggcggaacattcgctagcagcttctgctcaaaaaaagcttcattttcgacgccatacacgcgccgcagctcaacgagcgccaactctcgccgggttggcatcgacgtggacagcgcatcaacggaatcagccaaggttttatactgtgcttgcatggccttcaatgcgctttcgacttcctcgggggtgtacgcatcatcgcttttttcaacaataatgccgttggcaatgccccagtcgataacggccgtcatctgagcgagttgttgctgacgcttttcaagctccgaaacaggcgctttctcatcgagttccatgatctgcgcataggttttcgcatgcgttgatcccgggtgactcgcctcttggcgagccaccgctgcactgaaggaggcccattggtgggaaccatacaccagcgccgagggcagatcgtttacccgaaactcgggggcagacaccgacaacagttgaaaggcgatgattttggcattggcttcgccgaaccgggtggccagacgctcttcaaaacccgtgacaatttgcgcagcgctgaagccccaattacctggctgacgcaacgagtaccctgccagattattacgctccaggcctcctgccgaatccacatccaacaatagcgcgctaagcagtacttcctgcaggctggtagccgtggatactgcgtcgatgctgtcctggagcaacctggccaacgccatgccttctggagaaccgagaatggctttaaggatttttcaggttcccccttaccagaccgtaaaggttcaggaagggtaagccgcaagaattcgattaggctcggcataccgctggcttcatcagttttcgctttcggttgagcggctttccaagtggcaactacctggcgtaatttggcttgggcgtcagccgccaaagggacttctttagtgagtagcccgccataatcagccgtttgtggggactcggcactgcgtcgatatcgtgaggaggggggaaagttatggatttatctggaggagttgcaccgttaaatttgttatctatcggcgaatcggtttgaggataaagcgatatagaacgtgatgaatccagatagttggaaatcatggcgacattctcgaaagctattgcgcgcgacggggcaatctttcataaaagcctgtcacagagactccattcagcgccaggcttactaccaataaccgtctactcaaccttccctttcgacgttgtaaaatcaacattcactgcaaaagccaacaacgatattttgcgcatacccgctcattctttactcgcgcgcttttccattttcagcaagataccagcctgtgccttactcaccctggctattcgttcttcgagtgtattcatgcgactttccagtccgtcaaccccacaggcagcgggttcagcagccagataaggtttgaagaaaacttcatattgatcggcaacgtccttcgtatgttgttcagcgaagtccaacaggttctcaagttggctcatgcgctccagcgggtctttcgaccagttttgatccggcaaaaaacccgtttcggtatccccaaacttgagcaccatcgactgattggccaccgtgaacgcaagcacctgagcctcattcattctcgaatagagcttattgaggtcagtggtcactggcgcctctggacgctcgaccacagacttaccgctgggcgtcggcggaatcatgggttgaggcagatacgacgccttgatttgttcagaagcggcggtagacccggcatatgccccaatgttaattggcgcggacactatccctgttatcccggcactgatcgccgcatcgcgcgcgacatgcgccacagatggcgacgatggaatcacaccagacttgaccattttttcggcattcatcatccgggtcgtggcttccgcaatcgtcattttaggcgtagcagcgggcgcagggactttgttcttccaatcgaggatcttttggttgattttgggcggaagcagttgcacatgaggctcgttattgcccttgacggcgctggactgatcccttgctaccttgccgttcttatcgagcagccttccagtgcgatcaatcagaaagccttctcgattgacgcgctttccatccctatccaccaagtgaccctcagcgctgaccaagcgacccgagtgatcgatcaagcggccctgggggtcgacgagctgatttttctcattgacaagcttgccttgggcattgatcaaatgccccttttcattgaccaggcggcccttgttatcgaccgcttgaccgttattattaacccgttgcccatgttcattgatccgctggttattcgaattaatcagatggccttgtttattaatcgcctgccctttgtcattgagcaactgaccttgcttattgaccagccgcccttccttattataataactgcctgaaggcgcgtaatgcggaaccactttagacggccccggcagacgtttagatacgttaaccgcgggtggtttgattgtcggcatatagccacctcatcatgaacggacattaaatccaatagcgaaaccttatggcttctgttcattacgtggtcaccggtaaaaaatagttccttccggcctgcacccacactgcctattagataaagcgccccacccgagcctaaagaccgccataaaaacttcagagcacgctcacattaactagataccaccgcacgccgttgaattttatatttgcgcaacttcctataaagagtattacgacttattcccagcgcttgcgccgtgcacgtcatatgccagtgctgttgctccaatgccgccagcaacgtctggcgctcggcattatcgaggagtggctcgttggtgtgttgaacaggggtgtattgcaccatatcaggcagatccaacaaccctatccacccgtcttcgctgagtgccaccagtgtgcgcaataccgtgcgcaactgacggacattgcccggccaggcgaaggccagcaatgcctcgcgcgctgcgggctccacactgaccgattgctcaccggcctcctccctcagcaggaagtccagcagttgcgacttgtcgctgcgttcacgtaacgccggcaagccaatttccaggccgttaagtcggtaatacaggtcttcgcggaagctgccagcccgcacgcgctcacacaagtttcggtgcgtcgcgctgataatccggacatccacggcttgaggctcgccgccgatggggaccactaggcgatcctccagtacccttaaaagacgggtctgcaaagccagtggcatatcaccgatttcgtcaaggaagagtgtgccaccgtcggcctgttggagcttgccgcgcatgccatccttgagggcaccggtgaaactgcccccacgatagccgaataactcgctttcaatcaggctttccggaatggccgcgcaattgagcgctacaaacgctttaccggcgcgctgactggcgtggtgcacagctttggcgaaggcttctttaccggagccggtctcgccattgatgagcagtggcacatcacgctcaaatacccgcagcgctttgcgaaaatcattttgcatcgccgaatcgcccaggcaaatgctgggcagccgtgaaggctcaggctgggcgatgggggctgacgcgctgcgcgcttgcccacgcaaagcggcgaacagatgccggccatcccgcgtgcgcaagggccaactggccgtggcattcgcactggcgcggccgagcaattgatccagggagcaatcgaaaaatgcctctactggctgccccaacaacccgtcacgccgttgccccaacaagttcaacgcactctggttgaccgcacagatgcgcccttccccatcaaacgccagcaacccttcgctgaacaaccccaccgactccgcctgcagatgaaaacgcagcagccaatggttttcgaaatgacgcaggaagtaacaactctcgatcatcttcgccgacagattgaccagcgccatagtgtggaactggctctgacgcgataccgcttcccgtgcggatgacacatccagcacagccagcagatcgccatggggatcgaacaccgggctcgccgaacaggtcagcccggtatgccggccacggaagtgttcgtcacgatgaatggtcagggattggcgctccaccaggcaggtgccgatgccattggtgccttcgcacgcttcactccaatcggcaccgagccacagcccggcgcgttcgaagatcttgcgctctgatggcgcggtgacacagttgaggatcacgcctcgcgcatcggtcaacagcaccgcatgcccggcgccggacagctgctggtgcaggctgttcatctcactgccggcgatgtgcagcacctgttgcagccgctcgcggctttccagcaaacggccgtgttcaagcacggtgggggcgatggtttgcgcagggtcgaggtggtagtcctccaggcagcgcagccaggagcgggcgatggagggatcgctggacgggtcgcggccatgcgccacggtgagcacttgctgggcatggcgactgaaatgatcgttgtgcatttcttattattctccctgcgtgagaacccccagcatcccccagccatccaggcaatgcaatcccgggccgacccgccggtcacaggctgtaccgtttatggcacaaactgtcactcgggctgtatcgaccctgccacagcaacgccttgcaacaatgcccaaccccttgatttagctggctcacacagcagtggcccaacctttgctctacgcttatcaagcgctcgctgcgctgcgctcccaataaacataaaagccaggagatacccaccatgcgttacgcacaccccggtactgaaggcgccatcgtttcgttcaaggccaagtacggcaactacatcggtggcgagttcgttgcgccggtcgatggcaactatttcaccaacacttcgccggtcaacggcaagccaatcgccgaattcccgcgctctacggccaaagacatcgacaaagccctggacgccgcccacgccgccgccgacgcctggggcaagacctcggcccaggaccgttcgctggtcctgttaaaaatcgccgaccgcatcgaacagaacctcgaactgctggccatcaccgaaacctgggacaacggcaaggccgtgcgtgaaaccctcaacgccgacatcccgctggccgccgaccacttccgctacttcgccggctgcatccgcgcccaggaaggcaccagcgccgaaatcaacgaacacaccgcgtcctatcacttccatgaaccgctgggcgtggttggccagatcatcccgtggaacttcccgatcctgatggctgcgtggaaactcgcgccggccctggccgccggtaactgcgtggtgctcaaacccgccgagcaaaccccgctgggcatcaccgtgctgctggaggtgatcggtgacctgctgccacctggcgtgttgaacgtggttcaaggtttcggcaaagaagccggcgaagccctggccaccagcaagcgcatcgccaagattgccttcaccggctccacgcccgtgggcgcgcacatcatgcatgcggcggccgagaacatcattccgtccacggttgagctgggcggcaagtcgccgaacatcttcttcgccgacatcatgaaagccgaaccgtcctttattgaaaaggccgccgaaggcctggtgctggcgttcttcaaccagggcgaagtgtgcacctgcccttcccgcgcgctggtggaagagtcgatctacgacgacttcatgaaagtagtgatgaagaaaatcgagtcgatcaaacgcggcgacccgctggacaccgacaccatggtcggcgcccaggcgtccgagcagcagttcgacaagatcctgtcctatctggaaatcgccaagggcgaaggcgcacaactgctcaccggcggcaaggtcgagaagctgaccggcgacatggccggcggctattacatccagccgaccctgctcaagggcaccaacgaaatgcgcgtgttccaggaagaaatcttcggcccggtggtgagcatcaccaccttcaaggacgaagccgaagccctggcgattgccaacgacaccgagttcggcctcggcgccggtgtgtggacccgcgacatcaaccgcgcctaccgcatgggccgcgcgatcaaggcgggccgtgtgtggaccaactgctaccacctgtatccggcccatgccgcgttcggtggctacaagaagtccggcgttgggcgtgagacgcacaagatgatgttggatcactaccagcagaccaagaacttgctggtgagttacgacatcaatcctcttgggttcttctaactgacaacccgctctcacagttgaaatgcaattaaacatgtgggagcggacttgctcgctcccacatttaaatcttcataagtacttgcgaagtgcattcggcacgaagaggccgagttaaaacaataacaacggaaggtacttttcccatgtctagcgaacctacaagttcttctgtcgacttcgaaaaagtcgactcccaatacttccaacaacgcgaactgaaaaaaggcgccgccggctgggtgctgctggtaggccttggcgttgcctacgtgatttccggcgactacgccggctggaacttcggcctggcccagggtggctggggcggtatgttcctggccacattactgatggccaccatgtacctgtgcatgtgcttttctttggccgagctgtcttccatgatccccaccgccggtggtggctacggcttcgcccgcagtgcattcgggccgtggggtgggttcctcaccggcaccgcgatcctgatcgaatacgccatcgcccccgccgccatcgcggtgtttatcggcgcgtattgcgagtcgctgttcggcattggcggctggatgatttacctggcgttctacatcatctttatcggcatccacatctttggtgtcggtgaagccttgaagttgatgtttgtgattaccgccgtggccgcgattgccttgggtgtattcctggtgtcgatggtgccgcacttcagcatcgccaacctgctggacatcccggtgaccgaggccaagggcgccagtacgttcctgccgttcggctatgtgggtgtgtgggcggcaatcccctatgccatctggtttttcctggccgtcgagggtgtgccgctggccgccgaagaaaccaagaacccgaaacgcgacctgccacgcggcctgattggcgccattgtggtgctgaccagttttgccttgctgatcctggtgatcgcaccgggcggtgccggcacctacgcgttgatcaaatccggcaacccgttggttgaagcgctggcgttgtcctacggtggttcgacctggatgggcagcttcgtcaacctggtgggcctggctgggctgatcgcgagctttttctcgattatctacgcttattcgcggcagatcttcgcgctatcccgagccggctacctgccacgcaaactgtcgcaaaccaacaaaagcaaggcgccagtactggccctggtcatccccggcatcatcggctttggcctgtcgctgaccggccagggtgacctgctgatcctggtggcagtgttcggtgcaaccatttcctacgtgctgatgatggccgcgcacatcaccctgcgcatccgccgccccaaaatggaccgcccgtaccgcacgccgggcggcatctttacctcgggtgttgcactcgtgctggcctgcgtggccgtggtggcgggctttctggtggatccacgggtggtgattggcgcagcgatcatctatggagtattaattgcttactttgctttctacagccggcatcacttggtagcgggcacgcccgaagaggaattcgcggcgatccaggccgcagaggccgccttgcactgatagccgtaaacctcgacgcaggcacgtgcctgcgtcgccaaggagacactgtatggcaagtttttcccacgcggtgggtgcacagacctaccgcttcgacagcctcaaggacgtgatggccaaggccagccccgcacgctccggggactttctcgctggcgtcgccgcacagaacgacggtgagcgggtggccgcgcagatggcgttggcgaatatcccgctgaaacacttcctcgaagaagtgctgattccctacgaaagcgatgaagtcacccggctgatcatcgacacccacgataaacaggcgtttaccgccgtcagccacctgaccgtcggcggcctgcgcgactggctgctcagcgacgcagccgatgaacattccctacgcgccttagcgccagggctgacaccggaaatggccgctgccgtatcgaagatcatgcgcgtgcaggacctggtactggtcgcgcagaagatccgcgtggtcacgcagtttcgcggcaccatgggcctgcgcgggcgcttatccacgcggctgcagcccaaccaccctacggacgaaccggccggcatcgccgcgagcattctcgatggcctgctgtacggcaacggcgacgccatgatcggcatcaacccagccaccgacagcatcgcctcgatctgcgccatgctggagatgctcgacgcgatcatccaacgctatgaaatccccacccaggcctgcgtgctgacccacgtcaccacctccatcgaggcgatcaaccgtggcgtgccgctggacctggtgttccagtcgattgccggcaccgaggccgccaacgccagcttcggtatcagcctgagcgtgctgcaggaaggttacgaagcgggcctgagcctcaatcgcggcaccttgggccagaacctgatgtacttcgaaaccggccagggcagcgccttgtcggccaacgcgcactttggcgtcgaccagcaaacctgcgaaacccgggcctacgccgtggcccgacatttcaaaccgtttttggtgaataccgttgtaggttttatcggccccgaatacctgtacaacggcaagcagatcatccgcgccggcctcgaagaccacttctgcggcaagctgctcggcgtgccgatgggctgtgacatctgctacaccaaccacgccgaagccgaccaggacgacatggacaccctgctgaccctgctgggcgtggccgggatcaacttcatcatgggcatccccggctccgacgacatcatgctcaactaccagaccacttcgtttcacgacgccttgtacgcccgccagaccctgggtttgaaaccggcgccggagtttgagcagtggctggcgaaaatgggcatctttacgcaagccgacggcaaggtgcacttcggcaacagcctgccaccggcgtttcgccaagccttggcgcaattgggatgaaggagccgcctgtgcaactcgacctgcctgacaacccgtggctggaactgcgccgcctgacgccagcccgtatagctctgggccgcaccggcaccagcatccccactagcgcgcagctggatttccagtttgcccacgcccaggcacgggatgcggtgcatctgcccttcgaccatgcgggcctgcgcagtcagttggctgaacgcgggcgtgacagcctgttgctgcacagcgccgccactgaccgtcacctgtacctgcaacgcccggacctgggacggcgcctgggcgatgagtcggcccagctgctgcgcgatcatgcatcggccaatcccggcggcgtggacttggcggtggtggtagccgatggcctgtcggcactggcggtgcataaacacaccttgccgtttctgacgcgcctggaggaacagagcagcgcagacggttggtccttgtcgccggtcatcctggtggaacagggccgcgtagcggtggcggatgaagtgggccagttgctcggggccaagatgaccgtcatcctgatcggcgaacggccgggcctcagttcgccggacagcctgggcctgtatttcacctacaaccccaaggtcggcctcaccgacgcctatcgcaactgcatctccaatgtgcgcctggaaggcctgagctacggcatggcggcccaccgcctgctttacttgatgcgagaggcgtgtcgccggcagctgtcgggggtcaatctcaaggacgaggcgcaggtgcagaccatcgaatcggatgacccagacctgatgaaaggcaatttcctgctcagttcaccggatgactgatcgcggcacgattgcgctttttcgcgccattaggcagcatcgagtcacggccgcttgcgtggtcatcccccatttggaagttgaggcctggcatgcggattactcaagcgaccctggaacacctggacctgttgaccccgctgttcgtcaaataccgtgagttctacggggccttgcccttcccggattcgtcacgggcctttctggagaagcgcctgcgccgcaaggagtcggtgatctacctggccctggcggatgatgatgacaagaagctgctggggttttgccagctgtatccgagcttttcgtcgctgtcgctcaagcgggtgtggatcctcaatgacatctatgtggctgaagatgcacgccggcaactggtggcggacaacctgatgcgcacagcgaaaaagatggccaaggagacccacgcggtgcgactgcgggtgtcgactagcagcgacaacgaagtggcgcagaagacctatgagtccattgggtttcgcgaagacacggagttcaagaactacgtgttgccgatcagcgaagattgatcgcggtagaccaaacacctcaaatctactgtgggagggggcttgcccccgatagcagtgtgccagtcagccaatttgtaactggcattgcctcatcgggggcaagccccctcccacatttagccctgcagcgcttgcaagcccgagtaccacgacatccttcgctacaaaaccaacacgcttttcacctctcaatccgtataatgcggacctttcagggttgtaagaaatgcggcatacacttgtagccttattacccgagcttccgcacaggcctgctgagccgggccatccacacaggtgccatccatggatttcaacccgctcgaccttatcctgcatctcgacgtctacctcgacctgctggtaaccaattacggtccgtggatctacgccattctgttcctggtcatcttttgcgaaaccggcctggtggtcatgccattcctgccgggtgactcgttgctgttcatcgctggcgcagtcgctgcgggcggcggcatggacccggtgctgctggcgggcctgctgatgctggcggcgatcctcggcgacagcaccaactatgtgatcgggcgaacggccggggagcgcttgttcagcaacccgaattcgaagatcttccgccgcgactacctgcaaaagacccacgacttctacgacaagcacggcggcaaaaccgtaacattggcgcgcttcctgccgatcctgcgcaccttcgcgccgttcgtggccggcatcgcaaaaatgccctacccgcgcttcttcggcttcagcgtattcggcaccatcctctgggtcggcggcctggtgaccctgggctacttcttcggcaacgtgccgttcatcaagaaaaacctgtcgctgctggtggtgttcatcatcctgctgtcgctggtgccgatgatcattggtgtgttccgcagccggtttggccgcacctcctccgaagccaagccgcagtaacctgcgatgtggtccctcagcgcctggcgtcgccagcgcttgctggccaagcacccgattgccgatgacacctggcaacgggtgcgccaccacctgaccttcctcgacggcctcaccgccgagcaggaccagtggctgcgcgaagcctgcgtactgttcctcgccgaaaaacacctgaccgccctgcccggcgtcgaactgcaccaggaacaacgcctgctgctcgccgcccaggcgcaactgccgctgatgaacctgggcgacctcgactggtaccagggtttccacgaaatcgtgctgtaccccgacgacttcctcagcccccagcgccaccgcgacagcagcggcgtcgaacacgaatgggacggcgagcacagcggcgaagcctggcaacaaggcccagtgatcctggcctggcccggcgtgctggccagcggtcagtgggaaggctacaacctggtcatccacgaactggcccacaagctcgacatgctcaacggcgacgccaacggcctgccaccgctgcaccacgacatgcgcgtgcaggaatgggccagcgtgatgcagagcgcctacgacgacctcaatcgccaactcgatgccaacccggacgccgagaccgagatcgacccctacgccgccgaaaaccctgctgaattctttgccgtcaccagtgaatattttttcagcgccccggatttactggtcagccgttatccacaggtgtacgcccaactcagccgcttttatcgccaggatcccctggcccgcctcacccaactgcaagccagcgacccgcgctatcagccacagggcgaatgaccgtacgacgtctggcgcatggcatcggcgtcagaatgtgcctataatcgccgccacttttaggccaatccggccatgtttcatggccaattaacgggggcaacgcccaatgagctacagcaagattccggctggcaaagacctgccgaacgacatctacgtcgccatcgagattccggccaaccacgcgccgatcaaatacgaaatcgacaaagacagcgactgcctgttcgttgaccgtttcatggccaccccgatgttctacccggccaactacggtttcatccccaacaccctggctgacgatggtgaccccctcgacgtgctggtggtaaccccttacccggtgaccccaggctcggttatccgtgctcgcccggtcggcatcctgaacatgaccgacgacggcggcggcgacgccaaagtgatcgcggttccacacgacaagctgtcccagctctacgtggacgtgaaggaatacaccgacctgccgcccctgttgctggagcagatcaagcacttcttcgagaactacaaagatctcgaaaaaggcaaatgggtgaagatcgacggttggggcaacgcagacgccgcccgcgccgagatcctgaagtcggttgccgcctacaaaggctgatacccgctcctcattgcctcggcaattgaaaaagccccgatcattcggggctttttttgtgggaaaaattaaacagcaagttcaatactttataaacaacgtttaacttaaaacgaaatccgaagtatcaggctacaactaagcaaaaccctacaagcgcaactcaacgcatggtttatttgatctgtaattccggccagtaaactctgcgtttatgaatacatcaggtgatcgtttaaaagcgctactacgggaagttcatctttccgcctccgacttcgccaagaaccgcggtgtcacgccccagcacgtgaacaactggttcaagcgcggtgtacccatgggccgactcaacgagatcgcagaactgctgtgcatctccagccgttggctgcgcaccggcgaaggccccaaacacccaccggccaacttcctgctggaaggcccgagctcacgaaaaggactgcccaccacccgcgaagccagcggcaaatacctcacaggccccgcctgcctcccggaaaaaaccgacgtggagatcgacctccacccctcattcacctctaccgaatgcatccgcatcacccttcacaccctccaggccctcaacgtaaaacccgaccgcgccctgggcgcctacatggtcgacaacagcatgatcgacatcatccaacaaggcgccaccctcgccatcgaccgaggccgcacccaaatcatcgacggcgaaatctacgcggtagaacacgacggcatgctgcgcatcaaatacctctacaaccgacctgggggcggtttgcgcatgcgcagccacaatgccggcgagcacccagacgaatacctcacctacgagcagcgcttcgagcagaacttccagattgtgggttgggtgttctggtggtccaccctgaataaccgccgcccgcccgtgccgctggatgagcatttattgggctgggaaggctctaaatcggatccggaggtgggcaactgaggtgaatgtgggtatcatgcggcccacatttggcaggggggtggttttgcgctatccaccttgcctggcgaagcggaggagttcccgcggatgcccctactattcagccagacgagatgtgggctgagcgatttgaaggctggtgaggcttgtcaaaaacaagctgaagcagtccccgagaagccggccacaagccggctttttaatgtccgtaaatccccctagtgaattgtccaacaagctgttggacaattgaatgaccaaaagcgggcggctcacagcccctcattccggctatctcttccagatccagataacgagaatttgaggctgctacacagcccaacgcggggcaagcccgctcgccacaagacgctcaatcaagtatcaagtgcggcaaaaaccgactcgaatccttcgtgatcaaactattatcctcccgcaccccaatccccgccgcctggtccccgatcacccaagacccaatcaacgtatagctgtccccgaaccgtggcagcggtgcaaactcctgaagaataaacggcgcatccgtataagggccgtcctccttcacgatcaggccgtcagccgtttgcaattcaatattcgccccttcccgcgaaaaaaacggcttacgcacccagccctttggcacagctttacccggctcagtatccaggtgcgacgccagcaaattcggatgccctttgttgaactcccacaacaacggcaggatgcctttgttggaaagaatggccttccacgcaggctcgaaaaactgcgtgtcgcactgggcaatcgccgcaccaaagggctcgtgaaagatgaattcccaggcgtgtagtttgaacaggtggggaatccagcgatcttcgaggtcaacgaagcgaccttctgcggtcaggccgatgtcttcgatgtcgatgtggcgtgattcgataccgactttttctgcgacgaggcgcaggtagtcggtggtgcctttgtcttcgaccgagtctttcatggaggcgaagtagaagggctggctgacctgcagttgggcgaaggcctggtgcagtttggtgtcgatgctgttgaattggtcagcgtgcttgggcagcaggccgcgttcgatgcattgttccagccagccccattggaacgccgcggcttcgtagaggctggtgggggtgtcgtagttgagttcgagcagcttggcggggccggtgccgttgtaggagaagtccatgcgcccatagaggtgcgggtggccttcgagccatgaggtgcggatcatgtcgtagaacggcgcggggatgctcaggcggtcgagcagttcttcgctgtggaccacgcgagcgacgaggtccatgcacatgtcatggacctcggtggtcgggtcttcgaggtcgtgctcgatttgcttgagcgtgaactggtagtacgcgctttcgtcccagtagggttcgttgtcgatggtgtggaacagaaagccgaggctgtcggcggtctgtttccagtcatgacgttctgcgcagtggatcttcttcatggcccgtcttccttagctactcgacccgccgccgccccagccgctacgtgcgctggccttgctgccgaagccgccacgggaggtggccgacgccacggagctcgacttgctgggcgtgcgcagcgtgttggtgtaattgctgctgccgtagcgggcctggttggaacggccgaaggtggcgccattggagacgcgctggttgagcgtcgagttgccgtagttgccacgatcatcgcgatagcggtacaccggttcggagcggtagctgttgcgattgttgctcagcatgttgccgatcagcaggccggtcagcaggctgctggtggagaagcctgagccgccactgttcgcttgggagctggcttgagcgttggccgcgtcgacctgggattgtgtcacctggccttcggcggtcagttcgaaaccgcccagccgggggatgaacttgccggtggagtcctgctggcaccagtcggcgacaaagtcggcatcgcaatcggcctggctgtcgtacaccggtgcaatgcggcgatgctcggccatggcggtcatgtaggcgtccgagcagacgtccaccgggagtttttcgtcggcgcactgctggacggactggaagttgtacttcttctgcaggtcgtaggttttttccgtcgggccgcagccggaaatcgccatggcgaccgacgctgccagcgacagctggacgtacttgcttcgtttcatcgggagctccgtgcgcgatcagttctgggtaggcgtcatgcacgcggcattcaacatgccgacgctgatggccacggcggcgacgtagatgccggccgcaagctcgccgttcttgatgcgctgggacgtgcccttgagcaccaggctggtcagcaaaaacgccaacagctggacgacggcggcgatcactgcccacacgacaaagtcgagcacgctgatcgagtaggcaatcacgttgctggccggaatggcgaaaccgacgatggcaccgcccagggcgaccgccgcggagacgttacccgcacgaatcagttcgaattccttgtgcggggtgatgcgggtgtagatgaactggaacagcgcgaacagtacggcggccccgaggatatagatcacaaacccgagcacggcggctttgttcagggagatggagagagcttctagcatgaatggcttccttgtttagagcgcgttcaggtcggttgtgtacagcgaaatgcccagcgaggtgctcaggctgatggtgccttcagcgtcttcttcgacggaaaacagcaggaactcgcgtcgatcggtcaggccggtgtcacgggcatatagcatcgagcggtgctcgacgctgtaggaatcctcggggttgatcacgcgctcgctcatggccaccagttcggtctggccctcctcgctgccccatacgcgcgcgtattcgacgccgtcgtgggtgtaggtcggcaacccgatcaggctctgcggccccgccagccgacgcagttcggcttcactactgatggtgatgtaactgaggtagttaaacaggatcaccgactcgacctgcccggcgatgtcacccgtggtgtgcacctgcaaccagtagtcttcgtcgttcatgtagtagcgcgacagccaggtcgactgcccgaggtcgacggtgccgttgctccagatttcctgggagccggggataaccaccgaggtgtgcccatccagcagcaatttcagggtggtgtcgaacatcacgcctttgtccggtgccaggcccagcggcccagtggtcggcagggcttcggcggcggcgtggttcggttgtgggttcgcgttcggggcctcgagccccatcaactgtttaaaccatcccattggagatttccttgaggcgggtggaggcgatgtagaagagttcgccaccctcaacgcgcgtggcgctgggcgggttgatcgacggttgctgggcgcccttggcgcgataaccgataagggtggcgttgtgatgttctttcatccgggtgtacaggtcgccgaacgtggcttcaaaggcctcgggcaatttcatcaggtattgggtggcgccctgccccacgcacagcagctcattgatgaccaccgacgagcccgggtcctgggaggcacgcaccagcatctcgatggccatgcttgaggtgcattccagacgcggcgcgtaggagctggcgagtgcggcaatttcgctttcattgaagtgcgcgaccacatgcccgacagggttgagttgattcaccgccagcaccgtggccagggtcaggtcgtcagacggggttcgcaccagcacacgctcggcaccgggcacaccggcacgcagcaatagcgccgtggaagacaggctgtcaccgcggataaatgcggccttgcccggcatcgggttttcgtcgagggtgcaatcgcagatgacgatcaggttgtcgttcgaggtttcgtcctgcagcagcaactcgatgacccgctcactggacgcgccttcccagccaatcagcacggtatgcccgaccttgccggtgaaatcacctttgcccttcatgccttttctccatgcatcgatgacgctgctggtggttttgccgatggctgccgtcagcagcgcaatgccgccgagcatgatccaggcggccacgaaaacccgcccggcggaagtctgcggcgcaagatcgccatagccgacggtcagcgtcgtggtgagatagaagtaaacaaatgtggcgaaggcggtgaggtgctgttcgcccagcaccaccaggcccagataagccgtgctcaggtgtacgcccaaggcgatgaccaggcccgcccagccgaagcggtgaaacagggacgaggcgtacatgcgcaacaacagaaaaatcgacattcttgcccctgattccctgggtacttgtcatcgcctggaggcgcaagtgcgttcagccggcattaaacctgctgcgcggcgtagagagaagtaccttggctgcaataaatccggcgaatgcaccaaacagatgcccctcgaatgaaacaccctggcgaggcataaagccaaggaccagtccgccatacagtaccgccacgacagcggccgttatcaggttgctccagctccggtggaaccaggcgcgcgacaacaggtaggcccacaaaccgaagacccaaccactggcccccacgtgcacgccggcaaagccgaacagccagaccagcgagccgcccagcaggatgatgatcgcgctgacggtcacgaaccgattgagcccttcgataatgaccagggtgcccaggatcaaaaaagcaatcaggttcgcgctgaggtgcgcaaacgacccgtgcaaaaacggtgaggcgaggatgccgaacagcccctgcagcgttctcgggaccaggccgaatgccataaggctgtaaccggtcgcgacattgaccagttgcaacgcgaccatgaacagcgccaagcctgcgattgtcttgaaacccttcagggcatccatcctgacctcgacataataagaagggcagacactgcccttcctgcatcgccgttgcttactcggccgacttttgcttcagacgttccagaatcgcattggcactgccttcgttcggcgtgatgccggcttcacgcagcttgcgttccaggtcggtaccggtcgacgcttcggccagttcatcctgggcttgcagttcagcggcacgttgctgctgcttggcctgcagacgattcagcgtaccgacggcggtttccagcttgccgttggccccaccgctggcgatggacgcactgacctgggccttctgtacgctttcgcgcgccttgaccatgtccacttgctggcgcaggcttttgatgcggctttcagccttggtgatgtccttgcgcatgctgtccgcataggcgccgaactcggtggcctgcttgtgctcggcgtcccgctcgctggtcagggtcgagatggcttcggccacttccagggcgaggtcttcacgattggcctgcagggcagccatcgccttggattccaggtccttgatcttggcgtcgtactcgctgacacgatccgtggccagcttgtgcttggccatgatgctgaccagctcacgcttggcattggccagcgcggtgtctgcatcgcgaatttcctgatcgagaatgcgcagggcctgctggtcgacgattgattcgccgacttcgctggcaccgccacgcagcgcggtgaacagtttgctccagatggattgagtcattggatactcccggatacttaattgaagaaacgttcaaaggcttcgctggcgcgttgcacgttgtcgaccagggttttcacctcggtcacgatgttggtcaggctggagtcggagctcaatgcgccgaacatgttgtagaccacctgcccgttcggcatggactcgatgccgatggaggacagcgggaacatttcccggctgcgcagcaccgcatcattgaatttcgcgacatcgttgatggactcgacatcgaccagcacggtgtcgacgatgatctgctcacccaccaccgcgatgtaaatcggcaagccgccgaagtcgttcatctccagcttgatgctcgactcggagccttgaaccagagaaagcgtaatgtcgttggagaccacgtcgtccagggcctgaagcgccgtgaagaggcggtcgatattccagttgttacctgcgctcatgaaattctccgacatgaatgagccagccaggatcggctggcgaagctgtttctccatctgcttgagcaggcttcggttttcgggaagcacccaagtctcgtgtttcacatagccggcggccgccaggcccgcgcgcatctgcttcatgtaaaagctcgatggttttttcgcggacgacttcaagcgctctccctgaaggctggctgaatcggtatcgggcccttcagacgggctcgatggagagctgcttttcatggtgctgacctcgttgtgaaaaactcacgcgtgagaaaatctacaggctatttttgccatgctcaatagctcacgcgtgagatatttttccttacatgttcctgtcacgaaaaagacctgacttattgcccgactcagcattgtcctatccaggttgacggtattacctattccagccgatttatcccccgcagcccacccattaatctgtgcccatgttgaaagcaacgcccaaccaacctgaacaaaaaaggattcaaccatgagcactgcaacctacaaccgcctcaacaaagacgacgccattgttctgctggtcgaccaccagaccggcctgatttccctggtgcaggacttctcgcccaacgagttcaagaacaacgtgctcgccctggctgacctggccaagttcttcaacctgccgaccatcctcaccaccagcttcgaacaaggcccgaatggcccgctggtgccggaactgaaagagatgttcccggacgcgccgtacatcgcccgccctggccagatcaatgcgtgggacaacgaagacttcgtcaaggcaatcaaggccaccggccgcaagcaaatcatcattgctggcgtggtcaccgatgtgtgcgtagccttcccgaccttgtcggcgctggcggaagggtttgatgtgttcgtggtgaccgatgcgtcgggcacgttcaacaccacggtgcagcaggcggcgtggagccggatgacccaggcgggtgcgcagatgatgaactggttctcggtggcctgtgagctgcaccgcgactggcgcaacgatatcgaaggcctgggaaatctgttgtcccagcgcattcctaactatcgcaatttgatgaatgggtatgcggcgctgacggcccatcagaagtaactcaaccgaacgtcgccctaagcctgccctgaaaagcaggcttttgttgctgtgtgcaggccacagggcaattatcgccagttctacctaaagaccctgcaagggctgactcttaaaccggtgccccgaccaacagttgtccggctacacggtccagcactgcaaatgcctcttcacgcttttcaacagacattccagcaatattgcgtagcttccattgcaccgccggtagcttatcaataccgtccagggccagcagctcccaatcaggctttgcacgcttaagtgaaagcaaaaaagcagcatcttgcgcacaaaactgctgccgtatcgcctcaagcaacccatgccgggtactctccaactgttcaagcgtgacaggctcacgggtcatgccggcaaactccgcttggaatatgcccgcgagcggtttccaccgtggcgcaagcagctcgctcatcggcctccgatgactgatcaagtacaccagaaaaccctcgaagatttcccgcgtcagcccctcctcgcggagcatcagcatcacgtcaaaaagatcccggggatgctgtcgatccagcgcagcgcaaatcttgccaccatacaaatcgggcaacgagaccacagggatagaagcgaacccgaattgatcttcaaccaacgccacgacatcacgctcttgcggcgcatgaacagtgccccgcatcacaggcgaaacttcgatcttgatttgagcaaacgggctgcgtaccagcactcgcagttcatcgtctcgatttgcttggaccgtcgcaccgacgcgaggtaagccttgcgcaaccgcatccgcgatgcgttggagcgccagacggacatcgcctaatgcctgttggcgatcagaacttggcaggtacgccaggtctatgtccaccgacagacgagggagatcacgtatgaacagattgatggccgtcccccctttcagggcaaaacaccgctctgccgctacgtgagggatgacctggaccaacaatcgaacctgagcggcataacgagcatcaagcgccattggcaaaactctccggcacggtgattaggaactctttatcgagtcgaccaccccggatgagttggcgtttgcctttacctagatcgatgctggaaagatctattcgctcataccacacgtgtcgcgcgtttcgcgccagcaggaggaaaacacgtttgacgcgaatcgagttgcacgcttcaagcaacttctgcaggcgcctggggctcagtgagcccaaaccgctgaacacatcagcgacatgactgaagagcatctcgtcggcggcttgatgaataagctcaagtacggcgcgttccggggttgcgatttttaactcaaatcggctgtaagggacctgtaaaacttgtaacgccatatcttccatttccgcgaaaagtccaccgggatagaagttcacgtcgacgtcccaagggtacttgcggaaccagcccgcaagcacagcgcccggtgttccgaacagatcgacagcctgctttccaaaggcgaggtaatggctgtagccgagtaaactcaacgccgtcgcgccgcccggccaaatatgtaccgatgcattttgctgcaaagcgaataccccgccctgccaatccagatcatcgccgcagcgtttccacgcgccatggcccacccgctcgacccaaccactgcgctgatacttttggatcaggctggggccgacgccatggctatgcagccaggcttgcgtcgcaatggaacccggtggccaatcagccagcaggcggtttattttcatgataaataagcacctataaggtcatgtttttcataaatactaaaccatcctcgagatgatttctgcgataaaccatagataaacaatcgtctcctttgagttgacggtattacctattccagccgatttatcacccgcagcccacccattaatctgtgtccatgttgaacgcaacgcccaacccccccaaacaaaaaaggattcaaccatgagcactgcaacctacaaccgcttgaacaaagacgacgccgtagtcctgctggtcgaccaccagaccggcctgatttccctggtgcaggacttctcgcccaacgagttcaagaacaacgtgctcgccctggctgacctggccaagttcttcaacctgccgaccatcctcaccaccagcttcgaacaaggcccgaatggcccgctggtgccggaactgaaagagatgttcccggacgcgccgtacatcgcccgccctggccagatcaatgcgtgggacaacgaagacttcgttaaggcgatcaaagccaccggccgcaagcaaatcatcattgctggcgtggtcaccgatgtgtgcgtagccttcccgaccttgtcggcgctggcggaagggtttgaggtgtttgtggtgaccgatgcgtcgggcacgttcaacaccacggtgcaacaagcggcgtggagccggatgacgcaagccggagcacagatgatgaactggttctcggtggcctgtgagctgcaccgcgactggcgcaacgatatcgaaggcctgggaaatctgttgtcccagcgcattcctaactatcgcaacttgatgaatggttatgcggcgctgacggcccatcagaagtaaatcaactgaacgtcgccctaagcctgccctgaaaagcaggcttttgttgctgtgtgcagcacacgcttgactctcccctatacggcaacccctaccctgaaacgccctgttcaggacctcacccatgccaacgcgcatcctggttattctcggccatccatccgcaaacagcttttgctctgccctggccgacacctacacccactcggcaaaaaccgcaggccatgaagtacgcgtcctgcgcctgggcggcctggcttacgatcccgtcctgcgccatggctacaaccagttccaacccctggagcccgacctgctcagcgcccaatccgacatcctctgggccacccacctgacattcgttttcccaatctggtggggcagcatccccgccttgatgaagggctttatcgaccgcgttttcctacccggttttgccttcaagtaccaaaccggcaaggcgtttcccgacaaactcctgagtggccggaccgctcacctgttggtgaccctggacacgccgccgtggtattaccgctggttctaccgcatgcccggcatccaccagatacgcaagaccacgctgggattgtgtggggtcaagacaacccaaacattgctgttggggccggtgctgggatctactgccgcgcagcgggaccggtggctggaacaggccggcgctttaatcggaaaagggagttttcatgtacatcggcaaagccgcgcagttgtcgggcaccaccatcaaggcgattcgtcactatgaagcaatcgggctgctgccggcgccgcagcgtcagggccagtaccgggtttattcggcgcagagcgtcgagttgctgttgtttatcaagtgcgcacagcagttggggttcaagctcaaggagctgcaagaaattcttcgagaccacgctggcggtacattaccttgggatcgggcggatcaggccatcgctgacaaaaaacacgcgctggccatgcagattacgacgctgcaacagatgcaagcagggctgcttgagttcgaaggccagttaaaagatgcacatggccgctgctctcaactggtgaccgcgccgcgctaagtggacgatgagccgaatagaatgcacaatcggctcatccaatgagccgaataaatgtggtattcggctcactcatcaggtattcgcccatgaatcatcctttctggatctggcaacaggccggctggccgcacttccactggcaaccgggacgcctggccgtcgtgctgcgtgagtgcgggcacgcgcagggtcggctaatgggcatgctcggcaccgtcagccaggcggtcagtgcacagaatgagctggatgccttgctgcaaaacatcctgacttcttcggcaatcgagggagagcaactgagtgtcggctcggtgcgctcgtcactggcacgacgcatgggcctggaggcgatgaaagacggtcaggtcagccgtcgcagcgaggggctcgcagagctgatgatggatgccacgcaacaatttgcccaacccttcaccctcgctcgcctattgaattggcaccacttgctattccctgctcagcatgaaggctttgctgcgcgcgcgctgaacatcggggcgttgcgcggggatgagccgatgcaggtggtatcggggcgacttgatcgaccaacggttcatttcgaggcgccgccgcgcaaaggcctggaacacgcgctcggtgagtttctggaatggttcgaaaccagccgcaaccaaccggaactggacccactggtccgcgccggcgtggcacatttctggtttgtcaccctgcaccccttcgatgacggcaatggtcgtctgacgcgtgccatcaccgatttggcgctggcccaaggcgagcatcaagctatccgcttttacgccatgtcggccagcatcctcgaagaccgcgctggctattacagcgcgctggaatccagccagaaggccacgctggatatcaccgactggctggaatggttcctcaagaccctgctgcgcagcctgcagcaagccatggtgcgtattgaccgggtattggacaaaagccggttctggcagcagcaccgcgacctcgcgttgtctgccgaacagatcaaggtgctcaaccgcctgctcgatggcgatgaaaagggttttgagcacggtatcagcgcggcgcagtaccaagcagtggcaaaggtgtccaaggccacggcgacgcgtcatctagctgatttgctggaaaagaactgcctgatccgactccccggaggcggccgcagcacgcggtatcaagtcaatacagcggacaagtgatacccccgctcatttgcccagaatccccatgtctgctagtgtcccgccggtttaccgtctaccggaatagccgccatggcccgcaaaaaagttgcactcgatttcgaacaatccctcgccgacctgcaatccctggtcgagcggctggagaacggcgagttgtcgctggaagactcgctgacggcgtttgagcaaggcatcggcctgacccgtgactgccagagcgccctggcgcaggcggagcagaaggtgcaggtgttgctggaacgtgacggggagttggccgaagaacctttcgatgcggaacagcccgaatgatcgacgcgtatcaggccagtagccaagcccgggtgaatgcggcgttggaacccttgtttgttgcgccaagccccgaactcaagcgtctttatgaagccatgcgctacagcgtgatgaatggcggcaagcgcgtgcgtccgttgctggcctatgccgcctgcgaagccttgggcgcaagcgccgaacaggccaacggcgcggcctgtgcggtggagttgatccacgcctactccctggtgcatgacgatttgccggcgatggacgacgacgatctgcgtcgcggtcagcccaccacccacaaagccttcgatgaagcctgcgcgatcctcgccggtgacggcctgcaaagcctggcgttcagcgcactgctggacccggcattgagcagcgtgaatgccgagatccgtttgcgcatggtcaccgccctggccgtggcggcaggcccggccggcatggtcggcggccaggccatcgacctcggctcggtcggccagaagcttgatcaacaggcgctggaatacatgcaccgccacaagaccggtgccctgatcgaagccgccgtacacctgggagcacttgccagcgggcgggccgacgccgctcagttggccgcgctgaagacctacgcgcgggccatcggcctggccttccaagtgcaggacgacattctcgacgtcgaaagtgacaccgccaccctgggcaaacgccaaggcgccgatatcgctcgggacaaaccgacttatcctgcgctgctcgggctggaagccgccaaggcctatgccctggaactgcgcgaccaggccctggatgccctgcgacctttcgacgcggcggccgagccactgcgtgacttggcgcggtatatcgtcgaacgccggcactgataacggcggcctttagggccgcatatcggccaagttcggcgctctgcgtgggcagtttgcgatgcttgaggtaaactgccgcctcttctatacctataacgattcgcctgatgcccacgacgtttcaagagattccccgcaagcgcccgtccacgcccctgctcgaccgtgctgtcacgccggccggcctgcgtcgactcggtgaagccgagctggaaaccctggccgatgagttgcgcctggaattgctctacacggtcggccagaccggtgggcattttggtgctggcctgggcgtcatcgagctgaccatcgccctgcattacgtgttcgacaccccggacgaccggctggtgtgggacgtgggccatcaggcgtatccgcataaaatcctcacgggccgccgcgagcaaatgggcaccctgcgccagaaggacggcattgccgcttttccgcgccgcgccgagagcgagtacgacacctttggcgtcggccactccagcacctccatcagtgcagcgctgggcatggcgattgccgcccgcctgcaaggcagcgaccgcaaggcaattgccgtgatcggtgatggcgcgctgaccgccggcatggccttcgaagcgctgaaccatgcgcctgaagtggacgccaacatgctggtgatcctcaacgacaatgacatgtcgatctcgcgtaacgtcggcggcctgtcgaactacctggccaagatcctctccagccgcacctacgccagcatgcgtgaaggcagcaagaaggtgctctcgcgtctgcccggcgcgtgggaaattgcccggcgcaccgaagaatatgccaagggcatgctggtgcccggcacgctgttcgaagaactgggctggaactacatcggccccatcgacggccacgatctgccgaccctgatcgccacgctgcgcaacatgcgcgacctcaagggcccgcagttcctgcatatcgtcaccaagaaaggcaaaggcttcgccccggcggaagtcgacccgatcggctatcacgccatcaccaagctggaacccctggacgctcctgccgccgcgccgaaaaaggccagcgggccgaagtactccggtgtgttcggcgaatggctgtgcgacatggccgccgccgatccgcgcttggtgggcattaccccggcgatgaaggaaggctccgacctggtggcgttcagcgagcggttcccgctgcgctacttcgacgtggcgattgccgagcagcacgccgtgactttcgcggccggcatggcctgtgaaggcgccaagccggtggtggcgatttactccaccttcctgcagcgcggctacgaccagttggtgcatgacgtggcggtgcagaacctcgacgtgctgttcgccatcgaccgcgccggcctggtgggcgaagacggcccgacccacgccggcagctttgacctgtcgtacttgcgttgcatccccggcatgctggtgatgacgccgagtgatgaaaacgaactgcgcaagatgctcagcaccggccacctgtacaacggccctgccgccgtgcgctacccgcgcggcaatggcccgaatgcggtgatcgaaaaggaccttgagcctatcgagatcggcaagggcatcgtgcgtcgccaaggcagcaaggccgccttcctggtgttcggcgtgcaattggccgaagcactgaacgtcgccgagaagatcgacgccactgtggtcgacatgcgcttcgtcaaacccctggatgaagccctggtgcgcgagattgccggcaaccatgagctgctggtgaccgttgaagaaaacgccatcatgggcggcgccggtgcggcggtcagcgagttcctggcgcgggagaatatcctcaagtcggtgctgcacctgggcttgccggatgcgtacgtcgaacatgccaaaccggcgcagatgctggcggagtgtgggttggacgaggccggcattgaggcatcggtgcgcgagcgcatggcgttgctcggcctgtagaaaccggatcaaaaggtgggagggggcttgcccctgatagcggtggctcagtcaaaattatgctgactgacacgacgccatcgggggcaagccccctcccacatttgatttgtgccaccttcaaatgccatggacagctcatgaatcgccttcgcctcaccctgtccctgttactgttgacctccccggaactactcgccgacacccgcgacgatgcgctgaaacttcccaacgtggtcatcagcgccaaccgccaggtccaggcgcgcaacgacagcagcgccgccaacaccgtgttcacccgcgacgacatcgaccgcctgcaacccaccagcctcaccgacctgctaagccgtgtgcccggcatgcaaatagcgcccaccggtggccgtggcagcttgcccggggtctatatacgtggcaccaaatccgcacaaagcctggtgttggtggacggccagcgcattgccaataccacctccggcgacagcggcctgcaatatctgaacgtcgaccagatcgagcgggtcgaagtactgcgcggctcacgttcggtgatctacggcagcgatgcgattggcggggtgatccaggtgttcacccggcgcaatgccgggcagggcctgcaaccacgtctgaagctcgggtttggcagtaataagacctgggagcgcagcctcggcctctccggcggcgatgagtacacgcgtttcaaccttggcgcgagcctggatgaaaccgccggtatcaactcgacgcacacctcgttccccagcgatggcgaccatgatgcctaccgcaaccagtccctcagcctgaacctcagccattcgttcagcgatgcgctggaggtggggttcaacctgttggataaccggggcaagtcggaatacgacaacagcttcggccgctacgacgtcgccaccgggcaaacagcggggcaaaaaccctacaccgattacaccgtgagcagcgccagcggctatgtcgacgccacgctcaacgagcgctggcaatcgcgcctggaactgggccatagcgagaaccgcgacaccaagcgcgacaccctcagtgatgacttcagcgtgttcaacacttaccgcgactcggtcaactggcagaacgacctgacgctgaatgagcagaacagcctgattctcggcggtgactggtacgaagaccgcttccacggctccaccaccctcactgaaaacagccgctggaaccgtgcggcctttgtgcagcatcgcttccatggcgtagggttttccaccgaactgggcctgcggcgtgaccagaaccagcagtttggcgggcagaacagctggagcggcaccctgaccttgccggtcaacccggacaacgacctgctattgagctacagcgagggcttccgtgccccgacattcaatgacctgtattacccggacgagtacggcttcaagaacagcaacccgaacctgaagcccgaaacctcgaaaagctacgaagtgcaatggcgcagccaactcagcgacaccagccgtctggaagcttcgctgtaccgcaccgacatccaggatgcgatcgtgttcgacagcgacggcccgcaaaacgtcagctcagcgcgcatcaacggcttcgaagccgcgctcaagcaagagctgttcggctggcaaggcaacctggggctggcaataattgatccacgagaccgtgattccggacgtacgttggcgcgtcgcgccaggcgcaccgtgagcctggacctggatcgccaattcgaccaattcggcgtcggcgccagctggcaagcggtcagcagcagctacgacgatgcgaagaaccagcaaccgttgggtggctatggattgctcgggctgcgcgccagttggacgctgaaccatgaagtcacactgaacatgaagctcgacaacctgctggacaaagcctacagccgggcgctgtatcagtaccagggccagcaatatggctaccgggaagaaggccgggcgctgatgcttggcgtgacctggacgccggacctctagccgggcgcgatcacttcacacagtcgggccacggcttccagcatctgcccgctgggccgctccaggcctttatccggcaccagccgtacccgctcagccatcgtcggccagaccttccaggcgtccttctgcgcctggtcgcccaccagaatcatctccggatcacgctgcaacaccgactcgatgctcacctgcggcgccggcagcttgagatcatcaaacacattgcgcgcgccgcacacccttaacgcatcgctgatgatctgcccgccacccacggtgtacagcggctgattccatacctggtaaaacacgcgcaatggctcggcgcgctgatagcgctgacgcagctcggccaggcgttggcgcaactgcgcggccaactgtcgacccgcgtcagcgcgacccaattgctcggcaatggcctggacctgggtggtgagctgttcaaggctatggggttcggcgacgtacaccgggatattcaggcgctgtaactgctcacgctgggccgggccgacactgccgggccacagcaggatcaggtcgggcttgaggctgagcaggcgctccatgtccaactgaccgtattgccccactgatgtcacttgcaccaacgctgccgggcgttcgccgccgtcgagcacgccgaccagcacatcggctgcgcccagttcgaccacgatttcagagagggacggcgccaggctcaccacacgctcggccgccagcgcctgggcactgaataccagcaacactgccagccagtgacgaatcatcccagttggcggggaatgcggtagaggtagaacagcaccacggtggacagcgccaacaggaacagcggcaccgcttccaacccgacgaagaccgacaacgcgccgatccaggccggtacggccgcaaccagcaacgccgtgcgccgacgggccgccagggtgatccaggcagcgggttcttcgggggtatcgagggctttggaggtggcgatcaacgcgtgtttatagccgttgaagtagcgcaggctgaggaacatcgaggccacaccggcaatgaagaacggcatggccagcaccgggagcaaggattcggcctggccgaacaccaggttgagcacaaacagggggagcagcgccagggccaggtactgccaccaattgaaggacagtcgccgtttcacctggcctcgggtcacgcgcggtcgacctcgccctggtgctcgttgcccatcatgtggtcgagcttgctggccttggtggccaggtagagtttgttatgcgggttgtgcccggtgtgcagtggcacacgctcggccacggtgatgcccatctcggtcaaggctttgaccttgcgcgggttgttggtcatcaggcgcagggatttgacgcccaggtgctcaagcatcggcaggcagatcgcgtagtcacgctggtcggcggcaaagcccaggcgctcgttggcctcgacggtatcggcgccaccatcttgcaactcgtaggcgcggatcttgttcatcaggccaatgccacgaccttcctggcgcaggtacagcagcacgccacggccctcacgggcgatcgcgcgcatggcggcttccagttgcgaaccgcagtcgcaacgctggctgaacaacgcatcaccggtcaggcattcggagtgcacccggccgagcaccggcgcgccatcggcgatatcgcccaggctgagcacgacatgctcgcgcccggtggcttcttcgaggaagccgttcatggtgaacgtggcaaaaggggtaggcagcttggaagcggcgacgaaaacgacgggcaccgtgtgctcctgatttcagtttttacagaggcggctattgtaacagcaggttcctacagacgcttaagctgaattatcactgataaagatcaatgggttcgattggccttcatcctggttctatgcaggtcagaacggatagggttgtttccagcgctcgaatatcggctttaactcaccgcttttcaccagggccgccatgcgctggtcaaagaccgccatcaagccccggccccgctcgttatcggcaaacccgatgtacaacggcagttcggcaatcggcgtcagcgtgaacttcgacgggtcatcggcctgattgagcacgtacttggcctcggtcaacgcatctatatagaagtccgcacggccgtgttgcagcatcggcaaaatgccgtcgcgacgctcgacctggttgaaacggtgcacattgggcaagtattcctcgtacttgtagccacgcacccaggccaggcggtaattgcccagcgtagccgccgtcggcgccggcgtgctggccagcccgagggcgtagatgtggtcggaatcgaagttccagtgggggtacaacacgcctttggcttcatcgcggtaggagccgacccagccatccacctcgccgcgttgggccaggccgaccgagcgggtgtagggcacggagcgggtctgcaatttgatgccggcgggctcgaagacctgacgcaacacgtcccaggccaggcccgtgccgtctttgttggtgtagtcgttccactcctcactggccagcatgatcttgccaggcacgtcctgcgcctggaccacgcccgtaaaggcacacagcattatcagcagccagcggcgcacatccatggtgacgacctcctacagggccttgcatccttgataacgctatagagggtagcgcaggtcgccgattcagggcgcctcgcgaaaatgctgataaccacggatggccggcgtgatgtcctgcccgctgccatcgagcaacgttacgccctgccctgcctcgacccggccgatcacatggatcggccaactatcggccagcaacggcgccagttcggcggatggcagggtgaacgccagcacgtagtcatcccccccactcagggccgccacgcgtgctgcatcatcgccaacaaacgccagcagcgcctgggacaatggcaaccgctcgcgttcgatcaacaggctgacctttgacgccatcgcgatatgcccgcaatcggccaggagcccgtcggaaatatccatcgcagacgtcgccttgccacgcagcgccagacccagggccaactgcggttgcggcgaccagtaatgagcgagcaagggctcggcgatggctgtgtcggcgcagcgctggcccaataccagtggcaaggcaccggcggcattgcccaattcgccgccgacacacagcaggtcacccggctgcgcaccgctgcgggtcaaggcttgcccggccggtacacgaccaaacaccgtcagggtcaggctcagagggccacgggtggtatcgccgcccaccaggcccacgccgcagcgttgcgccatgaggttcaaaccctgggcatagcgttgcagccaatcggcatcgacggttggtgtggtcaaggcaagggtaaatgcgagggggttggcgcccatggccgccaggtcgctcaccgccacggccaacgagcgttggcccagcaggaacgggtcacaggggtcggcaaaatgcaccccggcgaccaaggtatccgtggagattgccaactgctccccagcggggagcgccagcaaggcgcagtcatcgccgatccccagggctataccttcgccgccctgcgcacagggcgcggcggcgaagtagttgcggatcagctcaaactcgcccattcaggtttcaagcgcgattcagcgcttgtacgccttcacttcggcttcacgcaggcgcggggccagcttgtcgagcacgccgttgacgaacttgtggccgtcggtcgaaccgtagactttcgccagttcgataccttcgttgatcaccacgcggtacggcacatcgacgcgatacagcagttcccaggccgacaggcgcattacgcacagctcaaccgggtccagctcttcgatggtcaggtccaggcaaggcgccagggcggtgtcgatctcgctcaggtgcgcgtgcacaccgtgcaggatgtcgtggaagtacggcaggtccgcgaaagtgaaatcgttgtcgacgcgaaactgtgcttcgatctcgttcaacgacgcgcccgccaggtgacgctgatacaacgcctgggtcgccaactgacgagcagcgcgacgcttctcgttcttcgacggtttgccagcatcggctggacgtggctcgcgcgggttgaagttgtcgctctcgtcggaaatcacttggcctccaactgcgacagcaggctgaccatttccagggcagacagggcagcttcagcgcctttgttgccggccttggtgccggaacgctcgatggcttgctcgatagaatccacggtcagcacgccgaacgcaaccggtacgccgaactccatggacacctgggccaggcccttggtgcattcgccagccacgtattcgaagtgcggagtaccgccacgaatgaccgcgcccagggcgatgatcgccgcgtattcaccccgttgagcaactttatgcgcaaccagtggaatttcgaaggcgccaggggcacggataagggtgatgtcgctttcgctaacaccgtggcgaaccagggcgtcaacggcaccgcttaccaggctttcaaccacgaagctgttgaagcggccaaccaccagggcatagcggcctttgggggcgatgaaggtaccttcgatggtcttcagggtcattcgacaaatctcttaaagagccgggacgcgtgtatgacgcgtcccttagtgatatttgaaccgcgaacaaggggcgaaaatcgccggcctttattcggagggcacgtattctactacttccaggtcgaaaccggatatcgcattaaatttcatcggtgcgctcatcaggcgcattttgcgcacgcccaggtcacgcaggatctgcgaaccggcaccgacgatgctgtaggtggtcggttttttcaccggcgcgtgatccgccgtttcgcggatatgcgccagcagcacatcgccatccaacgggtgcccgagcaacagcaccacaccgctgcctgcctcggagaccgcagccatagcggcgcgcaggctccagcggcccggctgcttgaccatcagcaggtcgcgcagagggtccatgttatgcacgcgcaccagggtcggctcttcggcgcagatgttgcccagggtcagggccatgtgcacatcgccttccaccgaatcacggtaggtcaccaaattgaattggcccagttcactgtccagtggctgctcggcaatccgctgaacggtacgttcgtggatcatgcggtagtgaatcaggtcggcaatggtgcccactttgatgttgtgttcggcggcaaaggcttcgagttcggcacgacgggccatggtgccgtcgtcgttcatcacttcgcagatcacgccgcttggctcgaaaccggccatgcgcgccaggtcgcaggcggcctcggtgtggccggcacgggccagggtgccacccggttgggccatcagcgggaagatgtggccggggctcacgatgtcttcggccttggcatctttcgcggcggcggcttgtaccgtacgggcgcggtcggcggcggaaatcccggtggtgacgccggtagtggcttcaatcgatacggtgaacttggtgccaaagcccgagccattgcgcggcgccatcaacggcagcttgagcaactcgcagcgctcacggctcatgggcatgcagatcagcccacgggcgtgcttggccatgaagttgatgtgctcaggcttgcaggcctcggcggccatgatgatgtcgccttcgttctcgcggtcttcgtcatccatcaggatgaccatcttgccttggcggatgtcttcaaccagttcttcgatgctattgagcgccacgcggcacccccttggtcaggatttcaggtagccgttagcggccagaaaactttcggtgatgttactcccggctggctctgcggccttatcgcccaacaacaggcgctccaggtaacgggcaagcaagtccacttccaggttcacccggcgaccaggctggtaagacgccatgatggtttcgctgagggtgtggggaatgatggtcagttcaaattcggcgccgttcacagcgttcacggtgaggctggtgccatcgacggtgatcgagcctttatgggcaatgtacttggccagctctttgggtgcgcggatgcggaactccacagcacgcgcgttttcgctgcgcgataccacttcgccaacgccgtcgacgtggccgctgaccaggtgaccgccgagacgggtggtcggggtcagggctttttccaggttcaccgggctgccggccttgaggtcgttcatcgcggtgcagtccagggtttcccgactgacatcggcagcaaagccgttgcccggcagttcgatgacggtgaggcacacgccgctgacggcgatactgtcgcccagcttgacgtcgcccaggtccaacttgccggtttcaaccagcaggcgcacgtcgccgcccttgggggtcatggcgcggatgctgccgatggattcgataatgccggtgaacatggccttctcctggaaaacgggacgggcacttgagcgcccggtcagaattatacgctcgcgggtggaagcgggatggcagtgactcgccagtcgtcgcctacagcgcgcatttcagtgatcttgagttggggagcgtcggccagtctctcaagcggccagtccagcaaaggccgggcggcggagccgaggaatttgccggcgatgaatatcacgtactcatccactaggtcttgctgggcaaatgcccccgccaggcttgggcctgcttctaccaacacttcgttgacgccacgggcggccaaggcgaccagcgccgagcgtagatcgacctggccatcgacgcccggcaccaccaggcattcgggaccacgagggaactggttctccgccgtcacgcaagtgatgaccaacgccggcccggccttgaagaacggcgcattgagcggcacgcgcaggcggccgtcgatcagcacacgcaacggcgggcgcgacatggccagcgccgtggtcgcttcgtccaggccgagttcggcggcgcgcacggtcaggcgggcgccatcggcgagcaccgtgtcggcgccggtcagcaccacgctggcctcggcacgcaggcgctgcacggcggcgcgggcggcggggccggtgatccattggctttcgccgctggccatggcggtgcgaccgtccaggctcatcgccagcttgacccgcacgaagggcaggccgtgttccatgcgcttgagaaaccccggattcaacgcgcgggcctgggcttccagcacgccactgaggacctcgatcccggcctgcgccaaacgctgcatgccgcgcccggccacttcggggttcgggtcctgcataccggccaccacacgtgcgacaccggccgttaccaacgcgtccgcgcacggcggcgtgcgcccatggtggctgcagggttcgagggtcacgtacaccgtggcgccacgggccttctcaccggcagcacgcagggcgttgggctcggcatggggttcgccggtgcgctcatgccagccttcgccgacaatctgcccatcgcgcacaatcacgcagcccacacgcggattgggatgggtggtgtacaaacccttgcgcgcgagttccagggcgcgggccatgtaatgggcgtcgagcaccgcttgttcggcagacggtgggttcattctttggcaggctcccgggccaggcggtcgatctcttcgcggaactcattgaggtcctggaagcgtcgatacactgaggcgaaacggatgtaggcgacttcgtcgagcttttgcagctcacccatcaccaactctcccaccaccaggctcttgacctcgcgttcgccggtggcacgcagcttgtgcttgatatgcaccagcgccgcctccagccgctcgacactcaccgggcgtttttccagggcgcgctgcataccggcacgcagtttttcttcgtcgaagggttggcggctgccgtcggatttgatcaggcgcggcaataccagttcggcggtttcgaaggtggtgaaacgttcaccgcaggccaggcattcgcgccggcgacggacttgatcgccctcggcgaccagacgcgagtcaatgaccttggtgtcgttggcaccgcagaagggacagtgcatggtgggcaggccacaaataatgggagggccatggtagcgcatccccgtggcaagacaagccatagcctttacggtatataggctgactattatgtttcatatttttttaagccacggattttgtcctttctggagccgtacatgcagttacgaccacttgttttgctcaccctgttcagtttcctggtcgcctgcagcagcgaagcccccaaaccgaccacgcctcaaccgacgcccgcacaagagaaaaaagtccccggtattgaagacctcggccccctgcccgcctatcaacgtgaaatcagcggcagcctgaccaacattccggccggtgccgaagtggagatggcgctgctggtgatcgacgaccgttcgcgcccgcaacaattgctggccagcagcgtgctgaccggtaacggcaagcccctggccttccgcctgcgcttcaatcctgaagcgttcccagcgggtgcccgggttgaattgcgtggtcgcgccagccagtccggccagttgatcctgcacctgccggccgtgcgcatcacccaggcgatcacccagaccaccggccccctgcaactcgtcaaggccccatgacgccaccgctgggcctgcaagttgccctgagcgaactgatcggcgacgcgcaattggtgccctgcccactgccgggcactgagttgtcgttgtggttgctggatgcggacaacatggaccgcgccttcagccccgaagaaacccggcgcatcctgcatgaaccgccctactggagtttttgttgggccagtggcttggcgctggcacggtacctggcggcgaaccctgagtgggtcgccggcaaacgcgtgctggattttggcgcgggttccggcgttgccgggattgcggcgatcaaggctggcgcgctggaagtggtggcctgcgacctcgacccgctggcgctggcggcctgccgggcgaatgccgaactcaacggtgtggaactgggttactccgcagacttttttgccgaagccgatcgcttcgacctgatcctggtcgccgacgtactctacgaccgcgcgaacctgccgctgctggaccagttcctgacccgaggccgcgaagcgctggtcgccgattcgcgcgtgcgcgacttccagcaccccgcttatcaaaggctggagatccttgatgcgctgacactgcctgacctggcggagccttgggagtttcgcaaggtgagcctgtaccattcgcggcgccagcccttatagttgccccattcccgctttattcgagacgccccatgagtgagcccacgccgtacatcttcgacgtcactaccgccaattttgaccaggcagtgatccagaactccttcgaaaaacccgtgctggtggacttctgggccgagtggtgtgcgccgtgcaaggcattgatgccgctgctggcgcagattgccgagagttatcagggtgagttgctgctggccaaggtcgactgcgatgccgagcaggatatcgttgcgcgttttggtattcgcagcctgccgacggtggtgctgttcaaggatggccagccggtggacgggtttgccggggcgcagccggagtcggcggtgcgggcgatgctggagccgcatgtgcagatgccaccgccggctgcggcagatcctctggaacaggcccaggcgctgtttgccgaaggtcgtatcagcgatgccgaagcggtgctggtcgcgctgttgggcgaagacaacaccaacgccgccgcgttgatcctgtacgcacgttgcctggccgagcgcggtgaattgggcgaggcccagaccgtgctggacgcggtgaaaagcgacgaccacaaggccgccctcgccggggccaaggcgcagatcactttcctgcgccaagcggccgacctgccggacgccgccgacctgaaaagccgcctggcgcaaaacccgcaggacgatgaagcggcctaccagttgacgatccagcaattggcgcgccagcagtacgacgcagcactggaaggcttgctcaagctgttcatccgcaaccgcagctacagcgaaggcctgccgcacaagaccttgctgcaggtgttcgaattgctgggcaacgatcacccgctggcgagcgtgtaccgccgcaagttatttgccgcgttgtattaatcgccgacccaactgtacagcggcgtatccccgccgctgctgacttttacctgggcactatggcgcaggcgcaccaacaggcgcttgcccaccgaggtatcgccggccaagccttccagttgatcaagcagttccagaccgctgagctggccggccttgcgcaacaggtcctgggcgccttgccacaggtcatcattgtgtttgaccggagccgccggtgcggtggtcgcgctggcagcgggcgccgcctgcaactgcgcacccagccgtgcccaatcgccgtcgtccagctccagagtcaaatccaccggcaagtcgccgaccgttccacgaattcgcaacatcgtcctcactcctgcacttttctgacgagcatgctcccatgcggcttgcgcaacgccaagcgggcggtcaaactctggcgccattgttataagatcacataacaaaactttcatgttctggagtcctctcatgcgccgtctgttgcttgctttaccgtttgccctgctgccattggcggttgcccacgctcatgatgatcacgaccatgaacacggtagccttggcgcccacgagcatggcgtaggccgcctcaacgcggtactcgacggccaggccctggagcttgaactggacagcccggcgatgaacctggtgggttttgaacacctggccaccaccccggcggacaaagccaaggtcgccgctgcacgcaaacagctggaaaaccccgtagcgctgttcaacctgcccaaagccgccggttgcgtggtcagcagccaggaactcaacagcccgctgttcggcgacaagcccgaagccgaccatgacgacgatgatgatgacgccaaagacggcgcccacgagcatcatcacgaccacagcgaaatccacgcccactaccagttcacctgcgccacgccgactgcgctgagcaacctggacctgacccaggtgttcaagaccttccccgccacccagaaaattcaggtacaactgatcggcccgagcggccagcaaggtgttgaagcaacggccactgcagccaccctgaaattctgagttcacatgacccacgcattgatcgaactgtccggcctgagcttcaactggcccggtcacccgcagttgctggacatccccgcgttccgcctggaagcgggggaaaccctgtttctcaagggccccagcggcagtggcaaaaccaccctgctcggcttgctcggcggcgtgcagaaacccagccagggcagcatccgcctgctcggccaggagctgaccgcactctcggccggtgcgcgcgaccgttttcgcgtcgaccacaccggctatatcttccagcagttcaacctgctgccgttcctgtcggtgcgcgagaacgtcgagttgccttgccacttttccaaactgcgtgcacaacgcgccaagcagcgccacggcagcgttgatcaggccgcagcagccctgctcgcgcacctgggtttgaaagacaaaaccctgctggaacgccgcgccgactcgctgtccatcggccagcaacaacgcgtcgccgccgcccgtgcgctgatcggtcagccggaactggtgatcgccgacgaacccacttcggccctggactacgacgcccgcgaagctttcctgcaactgctgttcgccgaatgccgcgaagccggcgccagcctgttgtttgtcagccacgaccagagcctggcctcgctgttcgaccgcaacctgtcgctggccgaactcaatcgcgccgccacgcccgcagaggtttgagatgtatctgttccgtctagcgatggccagcctggctaaccgccgctttaccgcgattctcaccgcgttcgccatcgcgctttcagtctgcttgttgctcgcggtggaacgcgtgcgcgttgaagcgcgcaacagttttgccagcaccatcagcggtaccgacctgatcgtcggcgcccgttccggttcggtgaacctgctgctgtactcggtgttccgcatcggcaacgccaccaataacatccgctgggacagcttcgaacacttcgccgccagcccccaggttaaatgggcgatcccgatttccctcggcgattcgcaccgcggctaccgcgtgatgggcaccaacgaatcctacttcgagcactaccaatacgggcgcaagcagaaccttgaactggccagcggccgagctttcgccaccgatcccttcgaagtggtactcggcgccgaagtcgccgatgcgctgcattacaaactcggcgacaaactggtgctggcccatggcgtcgcggtggtcagcctggtcaagcacgatgacaaaccgttcaccgtggtcggcattctcaagcgcaccggcaccccggtggaccgcaccttgcacatcagcctcggcggcatggaagcgatccacatcgactggcacaacggcgtgccggcccagggcaaaggccgcatcagcgccgaccaggcccgtaacatggacctcacgccgcaggccatcaccgcgttcatgctcggcctgaacaacaagatctccacctttgccctgcaacgggagatcaacgaattccgtggtgagccgatgctggcgatcctgcccggcgtggcgctgcaagagctgtggagcatgatgggcaccgccgaaaaagcgctgtttgtgatctcgctgttcgtggtgctcaccggcctgatcggcatgctcacggcgatccttaccagcctcaacgaacgccgccgcgaaatggcgatcttgcgttcggtgggtgcacggccctggcatatcgcgacgctgctgatcttcgaagccttcgccctggcgttatccggtgtgatcgccggcgtggggttgctgtatgtgtgcatcgccgcgtcacgcgggtatctgcaggccaactacggcctggacctgccgatgtcgtggccgagcgaatatgaatggacgctgctcgccggtatcctgggcgccgcgctgttgatgggcagcgtgcccgcgtggcgcgcctatcggcaatccctggccgacggcctgtccatacgtttatgaggaaggccttgatgcgtcgcgtcctgtttgcactgttgctgctgcttgccctgcccgcctgggcagccgagcctaaagaactgacctggtcggagctgataccgccggatgccccgccggaagtgccgaacatgcaacccctgcacaatctctccagcatggcgaatgccctggaatcggcccctgcagccaagcaggacctgcccaacgcgccggtggtgccagcgctcgatggccagcacattcgcttgcccggctacatcgtgccactggaagtcagtgaaaacggccgcaccaccgagtttttgctggtgccgtatttcggcgcgtgcatccatgtgccgccgccgccgtcgaaccagatcgtgcatgtcaaaagcgaaatcggcgtgaagctcgatgagttgtatcagccgtactggatcgagggtgcaatgcaggtcaaaccgtccaccagcgagctcgccgacgccggttaccagatggatgccgagaagatttacatgtacgaattgcctgaatagcgcttatcgccctttcattgagctgagtcaaaagaccgaacggaacgatctttaccattggacctacaacttttaaacgtcctttggagctcccatgaacaagtctctgctcggcgcgtccctcttcgcgctcgccctcgttgcccctgttgcgcacgctcacgaagcgggcgacattctggttcgtgccggtgcaatcaccgtgaacccgaaggccgacagcggccacgtcaaggttgaccaaggcccattggccggcgccaacctcggcggcaaggcgaccatgagcagcgacactcagttgggcctgaacttcgcctacatgctgaccaaccacgtgggtatcgaactgctggccgccacgccgttcgagcatgacgtgaagatcaagggcaccgccctcggcgccgccaacggcaagctcggcaccctgaaacacctgccgccgaccctgagcgtcgtgtactacccgctggataacaagtcggccttccagccgtacgtgggcgccggtatcaactacacctggatctacgacgagcacgtcggcagccgtgcccaaggcgcaggcttcagcaacttcaaggctgagaactcctggggctgggccgcgcagatcggcgccgactacatgatcaatgacaagtggatgatcaacgcccaggcgcgctacatcgacatcagcaccaaggccaccgtggacaacaacgccctgggccaaggcacacgtgccaaggtgaacgtggacgtggacccgatggtttacatggtgggtatcggctacaagttctgatgccgacctgaccagcaacacaaactcatgtgggagggggctcgcccccgatagcagtgtgtcagccaacacctagttgactgagccaccgctatcgggggcaagccccctcccacatttggagctcagtttcttcagctgtggcggtagaaccggtccagcaatgccggcaaccccgcccgccacgcccgtggcttgatgccgaacgtgtggaggatcttcttgcaagcgagcaccgcgtgttggggttcttcactcgcatccggccgggccgcatgggcctgggcggtgggggattcgatcgccaacgggtggtagttgcgcgcttcggtgaggatcgcctggcccagcgccaacggcgtggtcgcctcatggccggcatagtggtacgtgccccacagcggcgcagcgcaatcgagttgcttgagcaccgaaatgatcacccgtgccgcgtcatccaccggtgtcgggttgccgcgtcggtcgtccgccatcagcaactcatccggcttctcggcccgggccaggaagcgcccgagggtgccgtcgacgctgtcatccagcagccagccgaaccgcagcagcacatgttgcgggcaggtggcgcgcacgctctgttcgatacgccacaacgcctggccgcgcaggcccaggggcaccggctcgtctttttcgctgtaggcggtggcacgggagccatcgaacacgcgatagctggacggctgcaacaaggtgatgttgtggtgttggcacagctcggccaggcgctcgatggcgaactcctgggcagccaggcgggtttcgctgaccgcttcggcctggaaccagtcgaagtagtaggcgaggttgatcaacgcatcgggacgggtgtcgtcgagcaattgggtgaggctcgcggcatcccagccgtcttggggcggtttgggtgcgaggaaaccgatgtcttcctctgcaccgaggcgaatcagcgcctgcccgagggcattcccgccgcccagtaacataaggcgcattcgcatagattgagcaggcccggtctgtttggaacgaaggttttctggtattggccagaatcgttgcattttgcgggtttgtagcgcaaccgtcacggattaactatcttcgcatccacctccccgggctcatgctcaagggccgtgcgcgctggcaccatgacctgctgtggataagtctgcgcgaagtgcacctcggcgcagttatccacaagctttttcaggcgctggttgaacgcacggctcaccgcatactgcccgcccgacaccgtgcggaactgcgccgtcagcaccacgccgttgaggtccatcttgtccacgccaaacacctccagcggcccttgcaggttgtacttgaggaatacgtcgtcacggatcgactgccccgcttcacggatcagctccactgccttgtccacgtccgtgtcgtaggtgaactgtaccgagaagaacgcataggcaaattgccgcgactggttggtgaccgccttgatctggccgaacggcaccgagtgcacaaagcccttgccgtcgcgcaggcgcagggtgcggatggtcaggccttcgacggtgccggcatggccggagtcgagcaccacccaatcgccaatggacagggtgtcttcgatgatgatgaacaggccggtgatcacgtcctgcaccagttgctgggagccgaaaccgatcgccaggccgactactccggcacccgccagcaacggggcgacgttgatgccgaggttggccatggtggtgatcgcgcagatcaccaccaaaatgattttcaccgcattgcgcagcagcggcaggatggttttcacccgcgtgctgggctgacggctggagcgtttgttgaccggcggcttcagcgcttcctggatcgccgtgtcgagcaccacccagaacagccatgtcatcaacaggatcaggccgatgctgctgagcgagtcgctgatcgcgcgaccaatcgagttgcgctcggcgaattcaaacaacgacacgccccagatacgcccgagcacttcgataaacgccaccgccatgacgatgcgcaacagcgcatgcagcagactgaggaagcgctctttgtaggcgctgctgcgctggattgccacctggctgcgggatttgaacaggtgttgcagcaccgtactgaggaataccgtgccgatcagcaggatcgtggtgaacaacgcacagcgcagcaccttctggttgtcgtcgccggcgccgatcaggttgatcgccgagaccagcaccatcagcaggatcggccagtaccagagccccgagaagatccgcagtgattgctgcagcgccgggtgcttgaggcgctgggccaatggccgattgcggatcaggtgggcgaccgggcggcgcaggcgaaccaccagcacgccgaagatcaccgtcgcaaacaggccggtgaagaccgcgatgctgctggtgatattaccgcccaattggcgtgcgatctgcgggctggtgagcgcgtcgctgagggcggcgaggaagccgatcaggaacagcggcttggggcagtagtcgcgaataatctgcaccgccgggcgtttgtggccgacgttgaacatgacgatcacgcacaacagcattgaggtggaaaagataccgctgctggtggcgtaggcaaaacacagcgccagcgcgcggcccacggaggtcggtagaaaatggctgacatacaacgtaaggggcaggcaaaccaaagccgggagtgtgtacggcacgacatagcccagtacggcctgaaagcgtttgcgccgttcgaaaaacttacgttgccccaggcgtcgcaccatcacacgccccagtaacgtcagcagcgtaaaggcgccgacccacaccccggacagcaacagaaagtccccggcgacgctccacggcgagcgctcagcggtctggttgaccaggcggccgacttcgttcgcggcccggtcggcgcgcaggcgccattcgtcaatgaagttctggttgaggtccagcttctgctgcacatcatcaatgctggagctgatcgccccgagaaggccaccttccaccagcaactccggcttggccggcgcctcgggttccggcgcagtggccgcagcgtgtagcgcgccactgccgcaaaacagcagcacgccgagcagtaatgcaatcttgggattcagcaaaacaccgggctccttcaaaagggtctgtaaggaactgacgggtttgcgtcttgaacgttcccctctgccgtctgtaggaagccggaaactttcagccaaaaatcgcagtcagccatacacgggggccaggcccccacttttttcacaggagcaatcatggctgcgatccccgactgggtgcccatcacccccagcgtcgccatcactcgcttcacggtgttgacggtcaatatccacaagggcttcaccgccttgaatcgacgcttcatcctgcccgagctgcgtgaagcggtgcgcagtgtgggtgccgacatggtgttcctgcaggaaatccacggcacccacgagcgtcatccgcagcgcttcagcgactggccgaacatgccgcagtacgagttcctggccgacagcatctggccgcaatacgcctacggccgcaatgcggtctacccccacggcgaccatggcaacgcgttgctgtcgaaattccagatcgtgcgctacgacaacctcgacatctcccagagcggccatgaaaaccgtggcctgctgcattgcgtactgcgcctgccgggcaccggccaggaggtgcatgccgtctgtattcacctgggcttgcgcgaggtgcatcgccaacagcaattgcgcttgatcgagcagcgcatcagcgagatcccggccgatgcgccgttgattgttgccggtgatttcaacgactggcgacaaaaggccgacctgagccgcagcggcctcagagaggtcttcgtcgaaacccacggcaaacccgcacgaactttcccggcacgcctgccgttgctgccgctggaccggatctacgtgcgcaatttgaaggtgcataacgcccgggtactgaccacacggccctggtctcatctgtccgaccatgtgccgctgtcagtggagatcgagctatgaacgtcgccgtggaacacatcgccaccgaccaaccgcccgacgacgccaaggcccgcgaccgggattacggctggcagagcggcaaccaggtcgaactgctggagaatggcgaggcgtactttcccaaggtgttcgaggccatgcgcgcggcgcggcgggagatcctgctggagaccttcattctgttcgaagacaaggtgggccacgagctgcaaggcattctgatcgaggccgcgcggcgcggcgtgaaggtggtggcgagcctggacggattcggctgtggcgaattgagccagccctttcttggcgagctggccgaggctggcgtcatcgtgcagatgtttgaccccgcatccaagaccctgggcatccgtaccaattggtttcgccgcttgcaccgcaagattgtggtggtagatgccgaagtcgcgtttatcggcgggatcaacttttccgccgatcacctgggcgatttcggcccagaagccaagcaggattatgcggtgcgggtgacaggcccggcggtggccgacctgcatcatttcgccctggctcaaagtggccgccaggtgcgcacgcgacgcggttggcggcggcgccagcagcggcctgcgttgtggtccagcgacaacggtgaaggcctggtgcgcttgatctaccgcgacaacgtgcagcatcgcgatgacatcgaagaggcgtacatccatgcactgagcaaggcgcaacagcgcgtggtgatcgccaacgcctacttcttccccggctaccgcctgctacgcgagattcgcaacgccgcgcgccgtggcgtgcaggtgcaactgatcatgcagggccagcccgatgtgctgctggccaagctggcggcgcgcatgctctacgactatctgctcaaggatggcgtggtgattcatgagtactgccagcggccactgcacggcaaggtggcgctggtggatgacgaatggagcaccgtgggttcaagtaacctggacccgttgagcctgtcgctgaacctggaagccaacgtgttgattcgcgaccgagggttcaatcaacagctgtacgagcgcctggaaacactcgccaaaaaccattgccagaccatgccggaaaaccgcaagccacgcctgtggctctggcgattgaccgtgggcttcctggtgtttcatgtgatgcgtcacttccccgccttgaccggctggctgcctgcccacaagccacgcttgaaacccatcgggagccaggccaatgagcactgaatccaggtttgcacggtggaaaaaaccgctgacgattgccttcttcctactgctgatcgtgctgttcaccctgctcgctcgccgcattgattggagcgaggtggtgcagaccctgggcgacttcaaggtacgcacgctgctgatcgcaagcgcactgacgctgtgcagtttcctggtgtacgccagcttcgacttgattggccgcacctacatccgccagaacctggtgtggaagcagatcttgccggtaggcatcatcagctatgcgttcaacctcaacctgagcgcgtgggtcggcggcatcgccatgcgttatcggctgtattcgcgattgggcgtgagcaccagcaatatcgccaagattcttggcctgagcctggccaccaattggtttggctatatggcgatcgccggggtcgtgttcagcagcggcctggtcacgatgccaccggggtggaaagtcagcaccacggcattacaaggcatcggcgcgttgttggtgctggccagcctgggttacctggtggcctgtcagttttcgaaaaagcgggcgtggaccattcgcggcatggaaatcaacctgccgtcggtgcgcatggcgtgtctgcagttgctgctgggcgccttgaactggtcactgatggcggcggtgatcttcaccctgctgccggccaagctcgactatccactggtattgggggtgttgctgatcagtgcgattgccggagtgctcacccatattccagccgggctgggcgtactggaggcggtgtttattgcgctgttgcagcatgaggcctcgcggggcagtttgctcgccgggttgattgcgtaccgcgccatttatttcattgtgcctctgctgattgcgctggtgatgtacctcggtgtggaggcgaaggccaaggcgttgcgggtgaagaacacgcccgcctgattcaccgtggacgatgactcaaaccccaaagcggctgcggtaatcgctgggcgcgaggccggtgatttttttgaacgtggcgcgaaaggcaccggggtcctgatagcccaccgtccaggcgatatggtcgatagtgccgttggtgaactccagcatctgtcgcgccttgcccacgcgcaggtgctggcagtattcggtgggtttcaagcccgtggcgttgcgaaagcgccgtaggaaagtgcgctcttccaacccggcttcctgagccatcgccgcaagacagacatccaccgccccgctggcctgcaaccagtgctgaaccttgagaatggccgcatcaccgtggccaagaatcggcgcgaagttactgccacattggctggcactgtcactgtgttcgatcaccaggaaccgcgccgtgtccgccgcgatgctcgggcccataaggcggtcgaccaggcgcaggccaagttcggaccaggccatcaagccggcggtggtgatcaggtcgccgtcatcgacgataggcttgtcggcctccaggcgcaccgccgggtagcgggtggcgaaagacttggcggaagaccaatgggtggtagcgctgcgcccatcgagcagtccactgcgcgccagcatgatcgagccaatgcacacaccgcccagcaccgtgcctgccgcatgttgttggcgaatccactccagcagcgcagggggtgcctgctcttctgtaaactcgccgatcgacggcggcaccagcaccgccatcatcggttgctcgggaccgggatgactgctgaagacgcgcaccggtgtaccggcgctatccacctgccaatggctgacccgtagcaatggcaactgcgcggattgatgctcggcggcgatgcgattggccacgccgaacaggtcagtcaagccgtgcacggcggccagttgcgccccctggtagatcaacacacccagctcaaccacgaccattgtcagttttccccctgttattgtcggtgcagccaatcctaagtgcggacgccagctaagatactgggccccatcaacccatcacgaggcaacacacatggccaagcaagcgctcatcctaatcgatatccagaacgactacttcccccagggcaagtggccacttgacggcgtggacgccgcggcggacaaggctgcacaggtgctgcaggcgtttcgcaagacgggtgatgcggtgattcatgtacgtcatgagttcacctccgatgacgcgccgttcttcacgccgggctccgagggcgcgcacctgcatggcaaagtgctgaaccagggcaatgagccggtggtgctcaagcatttcgtgaatgcgtttcgcgaaaccaacctgcgtgccctgctggaacagcgcagcatcacggacctggtggtggtcggcagcatgagccatatgtgcatcgacgcggtggtgcgggcggcggcggacctgggctacacggttacggtgattcatgacgcctgtgcgacgcgggacctggagttcaatgggcaggtgattccggcggcgcaggtgcatggggcttatatggcgtcgctggcgtttgggtatgcgggcgtggtatcggcggatgaatacttgaaggcgcaagcggcggcggcatgaccgccacttgtcgctgcggcgtcagcgggtcgcgatgatgaacaggcgcggaaacggcagcagcacggtgccatcggccagggctggataagcctgggtgatccgcgcctggtattcctgtaggaacgcggctttttcatcgccagtcaacagtgcgagaaagggtcgcagcgccgaggctttgaaccactccaccactgccgcgtgatccgccagcgggtgcagataggtggtgcgccacacatcgacggtactgcagtgctgactcagcagctcgtagtagtaactcgcggcgtggcgctcattgtgtttgaccgcgccgatttttgcagaccaggggccatcggcggcgacttcgcgggccagccggtgggcgggctcatccagattgtccggggtttgtaccgccagcgtaccgccaggggtcagttggcggaccaggtgcgggtacagcgcggcgtggtccggcaaccattgcagggacgcgttggccaggatcacatcgaaggcttgcgcaggcttccaggcaccgatatccgccagttcgaagttaagcgccggtagccgcttgcgggcgtcggccagcatgtcatcggagctgtccatgccggtgacatgggcttgaggaaagcgctcggccagcacttcagtggagttgccgggtccacatccaaggtcaacggcattgcgtacctcggtattcgcaatggccgcgaccagatcacggacaggacgggtgcgctgctgttcgaacatcgtgtactgcttggctgaccaggtcatcacggctttccttctttttgagggtggctgcaagcctaaatcttgtgagcaatgagaacaaatgccaggattgacgcactcccatacctgaaaagtatcccgatgctggaacttcgccaactcaaggccttcgttgccatcgccgaagaaggctacatcacccgtgccgccgaacgcctgggcatgcagcaaccaccgttgacgcggatgctgcaaagccttgaagccgagttaggcgtggtcttgatggagcgcttgccccgtggcgtacgccccactacggccgggctcgcgttactggacgaagcgcggcagattctcgcccaggcagatagggttgcagaggtggtgcgccgtgccgcacgcggtgaacgggggcgcctggcaatcggcttcaccagctcggcggcgctgcatccctttgtgccgagcgttttacggcggtttcgcgaaacctttgtcggcgtgacagtggtgctggaggaagccgggaccggcgaactgctggacgcgttaatacacgagaagctcgacgccgcgtttatccgctcgcccctcagcgggacgcaatcgttgcaggacgaaccgatcctggtagaacccatgttgctggcgctaccgacggagcatcccttggcaatcgattcaggatcgcccctgcccttggcggcattggcgacggagtctttcgtgctgtatcgccggcgcgtggggttgggcttgtatgacgcgattctggtggcatgccgagaagctgggttcagcccgcaggtggtccaggaagccccgcgcatgaccgcgaccctgagcctggtggcggcggggcttggggtgtccattgtcccggcgtcgatgcagcgcttgcgcggggatggcatcgtttatcgggcgttgacggagtgccgcagcctggtggcgccgttgcatctggcgacgcggatcgatgacagttcggcggtgttgcagcggttcaaggagatggttgtcaccgccgcgtcgactgaagctgaccacgggtaataaaaaacccccgaggcctgagccagcgggggttctgtgtgttccgggttttaaacctcagaacgggatatcgtcatcaaagctgtcaaaatccggagccggctgcggagcggcctgctgtggcgctggacgcgactcacgctgcggctgctggcttggctgcggacgcgactgctgtggacgcggtgccgagttggacatgccgccctggccctgttggtcgccctgaggacggccgcccagcagttgcatggtgccttgcatgtcgaccacgatttcagtggtgtaacgcttgatgccgtctttttcccactcgcgggtctgcagcttgccttcgatgtagacctgcgaacctttgcgcaggtactcgccggcgatctctgcgaccttgccgaacatcgacacacggtgccattcggttttctcgaccttctggccggtctgcttgtcggtccactgttcgctggtcgccagactcaggttggtcacggcgttaccgttaggcaagtagcgaacttcgggatcctggccgcacgtaccgaccaatatgactttgttaaccccacgggccataacgttctcctaggctgggcgcgctgtcggcactgggttgaccagctgctcgagcgtcgcgcgatccaataattcggtgtccaatttgatgtagatggcggcttcttcagcaacaaccacggcatcggtaaccccagtaacggccttaaggcgctcgaccagaccggcttcgcggatcgcttcgggcgataacggcaaacgcagactcgtcacatagggaggttcgcgcatggtaacagcaaaggctagccagagggcagccagacctgcgcatccaaggaacacaaccgacaaaccgccatgctggaacatccagccacccatgatgccgcccagtgcggaacccaggaactgactggtggaatacacccccatcgccgtccctttgccgccggccggtgaaactttactgatcagcgaaggcagcgatgcctccagcaggttgaacgcggtgaagaacaccaccgtgccgattaccagcgctcgcaggctgtcgccgaactgccagaagaatagctcagtgagcatcagcgtcgcgacggcgccgagcaaaactcgtttcattttgcgtttcttctcgccatagatgatgaacgggatcatggcgaagaacgaaatcagcaacgctgtgaggtagacccaccagtgctgctccttgggcaggccggcttttgacaccagcgccaggggcaaggcgacaaagctgcacatcagcatggcgtgcaacacaaagatacctaaatccaggcggagcaggtccgggtgcttgagcgtcggcaacagggctttgcgcgcaacgccggactcacggtgctgcaacgtgccggtggagcgcggcaccataaaggccacgatcacgatgccgaacagtgccatgccgccggtggcgagaaacagcccgtgcagcccgaacgcgcgggtcagcaaggggccgaccaccatggccacggcaaacgacaggccgatggtcatgccgatcatggccatggccttggtgcggtgttgttcgcgggtcaggtccgacagcaacgccatgaccgcagcggaaatcgcgccggcgccttggaggatacgcccggcgatcacgccccagatggaatcggcttgagccgcgagcacgctgccgagggcaaacacgatcagccccaggtagatcaccgggcggcgaccaatgcggtcggaaatgatcccgaacggtatctgaaaaatcgcctgggtcaggccgtaggcaccaatggccaggccgatcaatgcgggggtcgcgccagcgagatccatgccataggtcgccagtaccggcaacaccataaacatgcccagcatacggaaggcgaacaccagggccagaccgcttgccgctcgggtctcgccgctactcatgcgttcgctgtggggatcgtgcatggaaaaacctcgtgtgaaccggcggcgattctaccagtcccatcgattgagagggtatatgcggcgctttgccgcgcagctttcatctaaggctgcacacggccttttgacagtgtatattcatccagtctttagccgtatactccggcattatttatgcccgccgtgcgaggccatcttggacaagatcctgattcgtggggctagaacccacaacctgaagaacatcgacctgaccctgccccgggacaaactgatcgtcatcaccggcttgtccgggtccggcaaatcgtcgctggcgttcgacacgctgtatgccgaaggccagcgccgctatgtggaatcgctgtcggcctacgcccggcagttcctgtcgatgatggaaaagcccgatgtcgacaccattgaaggcttgtcgccggcgatctccatcgagcagaagtcgacctcccataacccgcgttccaccgtgggcaccatcaccgaaatctacgactacctgcgcctgctgtatgcacgcgtgggtattccgcgttgccctgaccacgacatacccctggaagcccagaccgtcagccagatggtcgacctggtgctggcccagccggaaggcgccaagctgatgctgctggcaccggtgattcgtgagcgcaagggcgaacacctttccgtcttcgaagagctgcgggcgcaaggttttgtgcgggcacggatcaacggcaagctgtatgagctggacgaagcgccgaagctcgacaagcagaagaagcactcgatcgatgtcgtggtcgaccgcttcaaggtgcgcgccgacctgcagcagcgcctggcggaatccttcgaaaccgcattgaaactggccgacggtattgcgctggtagcaccgatggacgacgaaccgggcgaagagatcatcttctccgcccgctttgcctgcccgatctgcggccatgccatcagcgagttggaacccaagctgttttccttcaacaacccggccggcgcctgcccgacctgcgatggcctgggcgttaagcagttcttcgatatcaagcgcctggtcaacggtgacctgacgctggcggagggcgccatacgcggctgggacaggcgcaacgtctattacttccaaatgctggggtcgctggcgtcgcactataaattcagcctcgaagtgcctttcaatcaactgccggcggaccagcagaaagtcatccttcacggcagcggttcgcagaacgtcgacttcaagtacctgaacgaccgtggcgatatcgtcaaacgctcccacccgttcgaaggcatcgtgccgaaccttgagcgtcgctaccgcgagaccgaatcggccagcgtgcgcgaagagttggcgaaattcctcagcacccagccttgcccggattgccgcggcactcgcctgcgtcgtgaggcacggcatgtgtgggtcggcgagaagacattgccagcggtgaccaacctgccgatcggtgatgcctgcgaatactttggcgtgctcaagctgaccggtcgccgtggggagatcgccgacaagatcctcaaggaaatccgcgagcggctgcagttcctggtcaacgttggcctggactacctgtcgctggatcgcagcgccgataccttgtctggcggtgaagcccaacggattcgcctggccagccagattggcgccggtctcgtgggggtgttgtacattcttgatgagccgtccattggtttgcaccagcgggacaacgatcgcctgctgggtacgttgaaacacctgcgggatatcggcaacacggtgatcgtggtcgagcacgatgaagacgcgattcgcctggcggattacgtggttgatatcggcccgggcgcgggcgtgcatggcggacatattgtcgccgagggcacgcctgcagaagtcatggcgcacccggactcgctgaccggtaagtacctgtccggccgggtgaagatcgaagtaccggcaaagcgcactccacgtaacaagaagctggcgctgcacctcaagggcgcacgcggcaacaacctgcgcaatgtagacctggaaatcccgctggggctgctgacctgcgtgaccggtgtttccggctccggcaagtcgacgctgatcaacaacacgctgttcccgttgagtgccactgccctgaatggcgcgaccaccctggaagcagcggcccatgacagcatcaagggcctggagcacctggataaggtggtcgatatcgaccaaagcccgattggccgtaccccacgctccaacccggcgacctacaccggactgttcacgccgattcgtgagctgtttgcgggcgtaccggaatcacgctcacggggctacggaccgggtcggttctcgttcaacgtcaagggcggccgctgtgaagcgtgccagggcgatggcttgatcaaggtggagatgcacttcctcccggacatctacgtgccgtgcgatgtgtgtaagagcaagcgctataaccgcgaaacgctggagatcaaatacaagggcaagagcatccacgaaaccctcgagatgaccatcgaggaagcgcgggagttcttcgacgccgttccggcactcgcgcgcaagctgcagaccctgatggatgtgggcctgtcgtatatcaagctggggcagtcggcgaccacgctgtccggtggtgaagcgcaacgggtgaaactgtcccgcgagctgtcaaagcgcgataccggcaagaccctgtatatccttgatgagccgaccaccggcctgcacttcgcggatatccagcaattgttggacgtgctgcaccgcctgcgcgaccacggcaacaccgtggtagtgatcgagcacaaccttgacgtgatcaagactgccgattggctggtagacctcgggccggaaggtggttccaagggcggtcagattatcgctgtgggcacgccggagcaggtctccgaaatgccgcagtcgcacactggttactacttgaagccgttgctggagcgcgaccgggcctgactttttcaggctcaataaaaagcccctgtcactttacggtgacaggggctttttcgtatccgggaatcagaactgcgattgcaggtaattctccaggccgatcagcttgatcaggcccagctgcttttccaaccagtaggtgtgatcttcttcggtgtcattcaactgcacgcgcaggatttcccgcgtgacaaagtcgctgtgctgctcacagagctcgatgcctttgcaaagcgcagcacggaccttgtactcgagacgcaggtcggcagcgagcatgtcagggaccgtggtgcccacatccaggtcatccggacgcatacgtggcgtgccttcgagcatgaggatacggcgcatcagtgcgtcggcgtgctgtgcctcttcttccatttcgtggttgatacgctcgtagagctcagtaaagccccagtcttcgtacatacgcgagtggatgaaatattggtcacgagccgccagttcgcccgtcagcaacgtgttgaggtaatcgattacgtcggggtgaccttgcatcgccctacatctccctgcttgaaagtctgtagtttgaaccatgatgactcgaaggtcacgggaccaacggcagaaaagtgaagattttccgagaaaagtggcggaattaacgcaaaaaccgcccaaatgagggcggttctgcttatcgtttagagtcagttaagcgatacacccagcgcctttgcgattgcttctccataagccggatcggccttgtagaaatgctgcagttggcgctgaaccacgtcagtggaaacaccccccattgcgccggcaatgttgttggtgagcaagtctttctgctcatcgctcatcaagcggaacagtgcaccggcatggctgtagtaatcggtgtcttcacggtgatcgtagcgatcagccgcaccgctcaaggccaaggcaggctcagcgtactgaggagcctgtttcggcgcatcggcgtagctgttcggctcgtagttaggtgcagcaccgccgttgctgccgaacgccatcgaaccatcacgctggtagctgttcaccgggctacgtggggcgttcaccggcaagtgctggtgattggtgccgacacggtagcggtgggcatctgcgtaggcaaagacacgaccttgcagcatgcggtctggcgacaggcctacgcctggaaccatgttgctcgggccgaatgcggcttgttccacttcagcaaagtagttctgcgggttgcggttcaactccagttcgccgacttcaatcaaagggaattccttctgcgaccaggttttggtcacatcgaaaggattctcgtaatgagcgttggcctgggcctcggtcatgatctggatgcacacgcgccatttcgggaaatcaccgcgctcgatcgcaccaaacagatcgcgctgggcatagtccggatcagtaccggccaggcgagcagcttcggcgggtgccagattcttgatgccctgtttggtcttgtagtgccacttgacccagtgacgctcgcccttggcgtttatcaggctataggtgtggctgccaaagccgtgcatgtggcggtagccatcagggatgccacggtccgagaacaggatggtgacctggtgcagcgcctctggcgagtgagaccagaagtcccacatcatttgcgcgctcttcaggttgctttgcggcagacgcttctgggtgtggatgaagtcagggaacttcaatgggtcgcgaatgaagaataccggggtgttgttgccaacgatgtcccagttgccttcttcggtatagaacttcagggcgaagccgcgtgggtcgcgctcggtatccgccgaaccgcgttcgccacccactgtggagaatcgcaagaaggtaggcgtttgcttaccgacggactcgaacagtttggcgctggtgtattgagtaatgtcttgggtaaccgtgaaggtgccgtaggcacccgagcccttggcgtgtacgcggcgctccgggatgttttcacggttgaagtgagcgagcttctcgatcaggtgaaaatcgtcgaggagcaacggaccgcgcgggccggcagaacgggaattctggttgtccgcaacgggagcgccgctggcggtagtaaggattttattctggctcatgttcaatttccctcaggtcagacttggaactgccggctaatcggcttggagggagtattgatcatcaatatgacgtctacaaattcattaaattgtaggcttcgatagaaaataactaccaaactccccgcgactcatagtgccaagcacaaccgacagaaaattgtacaaatcgcgcttttcttacgcgcacaaaaaaccgggcactaggcccggttcttcgttacagcttgtcgtcttactcggcgcttacagcttcgccagcagtagcacgatcaaccaactcgacgtacgccataggcgcgttgtcgccagcgcggaaaccgcacttgaggatgcgcaggtagccaccctcacgggtagcgtaacgcttgcccagatcgttgaagagcttaccaacgatagctttcgaacgagtacggtcgaaagccagacggcggttagccaggctatctgtcttggccaaagtaatcagcggctcagcaacgcgacgcagttctttagctttcggcagtgtagttttgatcagctcgtgctcgaacagcgacaccgccatgttttggaacatggccttgcggtgcgagctggtacggctcaggtgacgaccacttttacgatgacgcatggttcattccttaccaaactcacgttcggtgattacgacgatcaggcagtcgccttgtcgtccttcttaagacttgcaggcggccagttgtcgaggcgcatgccgagggacagaccgcgggaggccagaacgtccttgatttcagtcaaggatttcttgcccaggttcggagtcttcaacagttctacttcggtacgctgaatcaggtcgccgatgtagtaaatgttttccgccttaaggcagttagccgaacgtacagtcagttccagatcgtcaaccgggcgaagcaggatcggatcgatctcgtcttcctgctcgattaccactggttcgctgtcacctttgaggtcgacgaacgcagccaactgctgttgcaggatggttgcagcgcggcggatagcctcttcaggatccagagtaccgttggtttccagatcaataaccagcttgtccaggttagtacgctgctcgacacgggcgttttccaccacgtatgcgatgcggcgaaccgggctgaacgaagagtcaagctgcaagcgaccaatgctgcggctttcgtcttcatcgctctgacgcgagtcggccggttcataaccacgaccacgagctacggtgagcttcatgttcagggcgccgttagacgccaggttagcgattacgtgatcggggttaacgatctcgacatcatgatccagctgaatatcggcagcggtaaccacccccgaacccttcttcgacaaggtcagcgtaacttcgtcacggccgtgcagcttgatagccagacctttaaggttcaacaggatttcaattacgtcttcctgtacaccttcgatggcgctgtactcgtggagcacaccgtcaatctcggcctcgactactgcacagccgggcattgaggacaacaggatgcggcgcagcgcgttgcccagggtgtggccaaaaccacgctcgagaggctcgagagtaattttggcgcgggttggactgacaacctgcacatcaatgtggcggggtgtcaggaactcatttaccgaaatctgcatggatgcacctattttctagcccttacttggagtagagctcgacaatcaggctttcgttgatgtcggcggacagatcactgcgagcaggaacgttcttgaaaacgcccgacttcttctcagtgtctacttctacccattctacgcggccacgttgggcacacagatcgagagcttggacaatgcgaagttggttttttgctttctcgcgaactgcgaccacgtcaccagcacgaacctggtaggacggaacgtttacggtctgaccgttaacgctgatcgacttgtgcgataccagctgacgggattcggcacgagtcgaaccaaagcccatacggtatacaacgttgtccagacggcattcgagcagttgcagcaggttttcaccggttgcacctttcttgccagcagcttctttgtagtagccgctgaactgacgctcgagaacgccgtagatacgacggaccttctgcttttcacgcagttgggtgccgtaatcggactggcgaccgcggcgttggccgtggataccaggtgctgcttcaatgttgcacttcgattcgatcgcgcgcacgccgctcttcaggaagagatcggtgccttcgcgacgagcgagtttgcattttggaccaatgtaacgagccattctttacaatctcctggattacacgcggcgcttcttcggcggacggcacccgttgtgcgggattggcgtcacgtcggtgatgctggcgatcttatagccacagccgttcaaagcacggacagcagactcacgacctggacctggacctttgacgttaacgtcgaggtttttcaggccgtattccagcgcagcttgaccagcacgttcagcagctacttgagcagcaaacggggtggacttgcgggaaccgcggaaacccgaaccaccggaggtagcccaagaaagcgcgttaccttgacggtcggtgatggtcacgatggtgttgttaaaagaagcatggatgtgggcgatgccatcaaccactgtctttttaacttttttacgaggacgagcagcaggttttgccatgataattttcctgtcgattcgctggggcgattacttgcggatcggcttacgcggacctttacgggtacgcgcgttagtcttggtacgctgaccgcgcactggaagaccacgacgatgacgcagaccgcgatagcaaccgaggtccatcaaacgcttgattttcatgttgatttcgcgacgcaggtcaccttcagtggtgaacttcgccacttcgccacgcagcaattcaatctgctcgtcgctcagatccttgatcttagcggctgggtttaccccagcaactgcgcaaattttctgcgcagtagtgcgaccaacaccatagatgtaggtcagcgagataacagtgtgcttgttatctggaatgttaacgcctgcaatacgggccattcagtgggactccaattgacagctacctacgccccggaagccaagaaatagggcgcgagataatatcgctgtaataacaaataatcaacccggcagcgcactagctgccgggcttcaagcggatcacactcagccttggcgctgtttgtgacgcggttccgcgctgcaaattactcgaacaacaccttcgcggcgaataatcttgcagttacggcacagctttttcaccgatgcacgaactttcatcaccaactcctcgaaccttatggggtactcagcgcaacatgccgctgccgtagcccttcaggttggctttcttcatcagggattcgtactggtgcgaaacgaggtgcgattgtacttgggacatgaagtccatcacaaccacgaccacgatcagcaacgaggtcccgccaaggtagaacggaacgtttgctgcaaccaccaggaactggggcaacaagcacacggccgtcatatatagagcaccgaacagggtcaaacgagtcagaacgccatcaatgtagcgtgcagactgctcacctggacggatgcccggaataaaggcaccggacttcttcaggttttccgctacgtctttcggattgaacatcaacgccgtatagaagaagcagaagaaaataatccctgcactaaacagcagaatattcaacggctgaccaggagcgatcgactgagagaggtcctgcagccagcccatattttcagactgaccaaaccaggtacccaacgaagccggaaacagcaaaatgctgctcgcgaaaattgccggaataacaccggccatattcactttcagcggcaagtggctagtctgcgcagcaaaaaccttacggccctgctgacgcttggcgtagtgaacagcaatacgacgctggccacgctcaatgaacaccacaaaaccgataatcgctactgccagcaaaccgatggcaaccaaggcaaaaatgttgatatcaccctgacgtgcagactcgaaagactgcccaatcgctctcggaagaccggcgacgatacctgcgaaaatcaacatcgagataccgttgccaacaccacgctcagtaatctgctcacccagccacatcatgaacatcgcaccagccacaaaagtggataccgcgacgaaatggaagccaaagtcaccagtgaacgcaacaccctgcccggccaggccaacggacatgccgatagcttggaccaaggcgaggatgacagtgccgtagcgggtgtactggcttatcttgcgacggccagcttcaccttccttcttcaactgctccagctgcggactgacggcggtcatcagttgcatgatgatcgatgccgagatgtacggcatgatccccagtgcaaagatgctcatccgttccagcgcgccgccggaaaacatgttgaacaagctaagaatggtcccctcattctgtcgaaacaggtctgcgagtcggtccgggttgatacctggaaccgggatgtgtgcgcctattcggtagacgataatcgccaggaacagaaaacgcagacgagcccaaagttcagacataccgcctttgccgagcgctgagagagcaccttgcttagccatttattcctcgaacttgccgccagctgcttcgatagccgaacgcgcacctttggtggcgccgattcccttgccgatagtgacagcgcgagtcacttcaccggacagcatgattttcacgcgctgtacgttgacgttgatcacgttggcatctttcagggtctgcacagtaacgatgtcgccttccactttagccagctcggacagacgcacttctgcgcgatccatggctttcagagaaacgaaaccgaacttaggcaggcgacgatgcagcggctgttgaccgccttcaaagcctggagcgatggtgccaccggagcgggaggtttgacctttgtggccacggccaccagtcttacccaaaccgctaccgataccacggcccggacgatgcttttcgcgacgggaacccggcgctggactcagatcattgagtttcatcgattaaccctctacacgcagcatgtagtaagccttgttgatcatcccgcgattctcgggagtatcctggacttctacagtgtgaccgatgcgacgcagacccaaacctttaacgcacagtttgtggttagggatgcggccggtcatgcttttgatcagcgttactttaacggtagccatgatcagaagatctccttgacagtcaggccacgcttggcagcgatggactcaggagattgcatagctttcaaacctttgaaagtggcgtgaaccacgtttaccgggttagtcgagccgtagcacttggccagaacgttctgaacgccagcaacttcgaggacagcacgcatagcgccgccagcgatgataccggtaccttcagaagcaggctgcatgtacaccttcgaagcgccatgggcggacttcattgcgtactgcagagtggtgccgttcagatcaacttggatcatgttgcgacgagcagcttccattgccttctggatcgcagcaggcacttcacgtgacttgccacggccgaagccaacacgccctttaccatcacctaccacggtcaacgcggtgaaagtgaagatacggccgcctttaacggttttggctacgcggttaacttgaaccagcttctcaatgtagccttcgtcgcgcttttggtcgttatttgacataacttagaactccagcccagcttcacgagcagcatcagccagcgctttcacgcgaccgtggtacttgaagccagagcggtcgaaagccacttgcgagacgccagcggccttagcacgcgtagcgaccagctggccaacctttgtggccgcgtcgatgttgccggtggcaccatcacgcagttctttatccaaagtcgaggcgcttgccaggactttgttgccgtcggccgagatgacctgggcgtagatgtgctgcgacgagcggaacacgcagagacgcacgacttcgagttcgtgcattttcaggcgtgctttgcgagcgcgacgcagtcgagtaacttttttgtcggtcatttgctatgccctacttcttcttggcttctttacgacggacgacttcgtccgcgtagcgcacacctttgcctttgtacggctctggtggacggaagtcgcggatctcagcggccacttgacctaccagctgcttgtcgatgcccttgatcaggatatcggtctggctaggagtctcagcagtgatgcccgctggcagttcgtaatccacagggtgcgagaagccaagggccaggttcaaaaccgtgccttttgcttgcgctttgtaaccaacaccgaccagctggagcttacgctcgaagccttggcttacgccttggaccatgttgtttaccaacgcacgcgtggtaccggccattgcgcgagtttgttgatcgccattgcgagcagcgaaacgcagctcaccagcttcttcaacgatctcaacggacgaatggatgttcagttcaagagtacccttggcacccttcaccgaaagctgttggcctgcgaatttgacttcgacaccggctggcagcttaacggggttcttagcgacgcgagacatgcttatccccccttagaacacagtgcaaagaacttcgccgccgacaccggcagcgcgcgcagcacgatccgtcatcacacctttgttggtggagacgatagacacgcccagaccgccacgaactttcggcagatcttcagcggacttgtactgacgcaggcctggacggctaacgcgcttcacttcctcgatgaccgaacggccttcgaagtacttcagctcgatggacagcagtgcttttacatcgctgctgatctgataacccgcaatgtagccttcgtctttcaggactttggcaacagctaccttcaacttggaagatggcatgcttacgacggacttttcagccatctgggcattacggatacgagttagcatgtccgctaacgggtcctgcatactcatgggctagacgctcctaatacaaaaaaattagccttgcggctacatatgtcgccgagaatctccgggtaaaacacacgggctcaggcgagccgcgtattttagacacactccagaaatgaaacaagccccaaaaggggcttgttccagattcaaggtcaccggtggtcgttatcttgcgattcgaaccacctggacttcgaaagtacttaccagctggctttaaccagacctggtacgtcaccacgcattgccgcttcacgcagtttgttacggccgaggccgaacttgcggtaaacgccgtgtggacgaccggtcaggcggcagcggttacgcatgcgcgaggcgcttgcgtcacgtggctgcttctgcagggcaactgtcgcttcccaacgtgcttctggacttgcgttcagatcaacgatgattgctttcagtgctgcacgcttcttggcgtacttggcaaccgtgagctgacgcttcagctcgcggtttttcatgctcatcttggccatggtcctactccaatcagttgcggaacgggaatttgaaagcacgcaacagggcgcgaccttcatcatcgttcttggcagtggtggtcagggtgatgtccagaccgcggagagcatcgatcttgtcgtagtcgatctccgggaagatgatctgctctttcacgcccatgctgtaattaccacgaccatcgaaggacttggcattcaggccgcggaagtcgcgaacccgaggcagggagatcgacagcagacgatccaggaactcatacatacgctcacggcgcagggtcactttgacgccgatcggccaaccttcacggactttaaagccagcgatggatttccgagcgtaggtcacaacgactttctggccggtgatcttttccaggtcagcaacagcgtgctcgatgacttttttgtcaccgatcgcttcgcccagacccatgttcagggtgattttggtaacgcgcggaacttccatcacgttcccaagcttaagttcttccttaagcttaggggcgatttccttccggtaaatctcttgtagtcgtgccatggtctaatctacctagcagtgttcaagcatcaaccgctttttgggtcgacttgaagacacgaattttcttaccgtcttctactttgaaaccaacgcggtcagccttgttggtttcgccgttgaagatggcgacgttagaagcgtccagcggagcttctttctcgacgataccgccctgcacgcccgacatcgggttaggcttggtatgacgcttgaccaggttcagaccaccgataaccagacggttattagcgagaaccttaagcaccttaccgcgcttacctttgtctttgccggcgatcacgatgatctcgtcgtcacgacgaatcttttgcatgtcggatctccttacagcacttctggggcgagcgagacgatcttcatgaacttctcagtacgaagctcacgggtcactggcccaaagatacgggtgccgatcggctcttgcttgttgttcagaagaacagcagcgttgccatcaaagcggataatggagccatcagcacgacgtacgccgtggcgagtgcggactacaacagcagtcatcacttggccttttttcactttaccgcgaggaattgcttccttcacggtaactttgatgatgtcaccgataccagcgtaacgacgatgggagccacccagcaccttgatgcacataacacggcgagcgccgctgttatcggccacatcgagcatggattgagtctgaatcatataatttctccgacccctagtccttagacttccacagcgcgttcgagaacatcaaccagtgcccaagacttggtcttggccagcggacgagtttcacgaatagtgactttgtcgccgatgtggcactgattggtttcgtcgtgcgcgtgcagcttagtcgaacgcttaacatatttaccgtagatcgggtgcttaacgcgacgctcgatcagaacggtgatggttttgtccatcttgtcgctgacaacacggccagtcagcgtacggacagtcttttcggcttcagccatgatcacttacctgcctgctggttgagcacagtcttcacgcgagcgatgtcacgcttaacttgcgagagcagatgagactgccccaactggccagttgctttctgcatacgcagattgaactggtcgcgcagcaggccgagcagttgctcgttcagctgctgtgcggatttttcacgaagttcattcgctttcatcacatcaccgtccgtttaacaaaggaggtggcgagcggcagctttgcagcagccagggcgaaagcctcacgcgccagctcttcagaaacaccctcgatttcatacaggactttgcctggctgaatctgggctacccagtattccacgttacccttacctttacccatccgaacctcgagaggttttttggagatcggcttgtccgggaatacacggatccagatcttgccgccacgtttcacgtgacgggtcagtgcacgacgcgctgactcgatctgacgagcggtgagacgaccacgagctacagacttcagcgcgaactcgccgaagctgactttgctaccgcgctgagccagaccacggttgtggcctgtcatctgcttgcggaacttcgtacgcttaggttgcaacatttggcgtaccccttacttagcagcttttttacgaggcgctggtgcttgtggtttcagttcttcttggcgaccaccaattacttcgcctttgaagatccaaacctttacaccgatcacaccgtaagtggtgtgagcttcgtagttggcatagtcgatgtcggcacgcagggtgtgcagtggcacacgaccttcgcgataccattcagtacgtgcgatttcagcaccgccgagacgaccgctcacttggattttgatgcctttggcaccaatgcgcatggcgttctgtacagcgcgcttcatagcgcgacggaacattacgcgacgctccagctgctgagctacgctctgcgcaaccagcataccgtcgagctccggcttgcggatctcttcgatattgatgtgcacaggcacacccatttgcttggtcaggtcctgacgcagtttctcaacatcttcacctttcttcccgataacaatacctggacgagcggtgtggatggtgatacgtgcagtttgcgccggacgatggatatcgatacggcttacggacgcgctttttagtttgtcttggagatactcacgcaccttcagatcagcgaacaagtagtccgcataagtccgaccgtctgcgtaccagacggaggtgtgctccttgacgattcccaggcgaatgccaatgggatgtactttctgacccatctcttcgactccgttacttgtcagcaaccttgacagtgatatggcaagaccgcttgacgatgcgatcagcacggcctttggcacgtggcatgatgcgcttcagcgaacgcccttcgttgacgaaaacggtgctgaccttcaggtcatcaacgtctgcgccttcgttatgctcggcgttggctacggccgactccagcactttcttcatgatctcggcggctttcttactgctgaaagccaacaggttgagcgcttcgcccaccttcttcccgcggatctggtcggcgaccaagcgggctttctgggcggagattcgagcgcccgacaacttagcggctacttccatttccttaccccttaacgcttggctttcttgtctgccacgtgcccacgataagtgcgggtaccggcaaactcgcctagtttgtggccgaccatgtcttcgttcacgagaactgggacgtgcaagcgaccgttgtgtacagcgatggtcagaccgaccatttgtggcaggatcatcgaacgacgcgaccaggtcttaactggtttgcgatcgttcttttccgccgccacttcgatcttcttcagtaggtgaagatcaataaaaggaccttttttcagagaacgtggcactgtcgtatccctctatttacttgcgacgacggacgatcattttgtcggtacgcttattaccacgagtcttcgcgcccttagtcgggaagccccatggcgataccggatgacgaccaccagaggtacgaccttcaccaccaccgtgtgggtggtcaaccgggttcatggcaacaccacgaacggttgggcgaacgccacgccagcgtttggcaccagctttacccagcgaacgcaggctgtgctcggagttcgagacttcgcccagggtcgcgcggcattcagccagcactttacgcatctcaccagaacgcagacgcagggtcacgtagacaccttcacgagcgatcagctgagccgaagcaccagcggaacgagcgatttgcgcgcctttacctggcttcaattcgatgccgtgtacggtgctaccaactggaatgttgcgcagttgcagagcgttgcccggcttgatcggtgccagggcacctgcgatcagctggtcgccagcgctcacgcctttaggggcaatgatgtagcgacgctcgccatctgcgtacagcagcagagcgatgtgagcagtacggtttggatcgtattcgatacgctcgacagtggcagcgatgccatctttgtcgttgcgacggaagtcgaccagacgataatgctgcttatggccaccaccgatgtgacgagtggtaatacgaccattgttgttacgaccaccagacttcgattttttctcgagcagcggtgcgtgaggagcgcctttatgcagctcctggttgaccaccttgaccacaaaacggcggccaggggaagtcggtttgcatttaacgattgccatgatgcaccccttccttactcagcactgctgctgaaatcgagatcttggcctggctgaagggagataactgccttcttccagtcattacgcttgcccagaccgcgagcagtgcgcttgctcttacccagaacattcagggtagtaacacgctctactttcacgctgaacaggctttcgacggccttcttgatttccagcttggttgcgtcagttgcaaccttgaaaacgaactggcctttcttgtcagccagaaccgtagccttttcggaaacgtgcgggccaagcagaactttaaatacgcgttcctggttcatcccagcagctcctcgaatttcttcacggccgacacggtgatcaacaccttgtcgtatgcgatcagactaactggatcggaaccttgcacgtcacgtacatcaacgtgtggcaggttgcgagcagccaggtacaggttctgatcaacagcttccgacacgatcaaaacgtcggtcaggctcatgttgttcagtttgcccagcagatctttggttttcgggctttcaacagcgaagtcctgaaccacgaccagacggtcagtacgcacgagttcagcaaggatggagcgcagagctgcgcggtacatcttcttgttgagcttctgcgagtgatcctgcggacgagctgcgaaagtggtaccgccgccacgccagattgggctacggatagtaccggcacgagcacggccagtacctttctgacgccaagggcgcttaccgccaccacgtacgtcggaacgggtcttttgctgcttgctaccttgacggccgccggccatgtaggccacgactgcttggtgaaccagcgtctcgttgaattcgccgccaaatgtcagttcggaaacttcgatcgcttgagcgtcatttacatttaattgcatgtcagcttccccttaaccgcgagccttggccgctggacgtacaaccaggttgccgccagtagcgccaggaacagcacccttgaccaacaacagattgcgttcagcgtcgacgcgcactacttcgagggactgcacggtcacgcgctcagcgcccatatgaccggacatttttttgcccttgaatacacgaccaggagtctggcactggccaatagagcccgggacgcggtgggaaacggagttaccgtgagtgttgtcttggccacggaaattccaacgcttgatcgtaccctggaagcctttacctttggactgaccggttacatcaaccagttgaccagcagcgaagatttcagcgttgatcagatcgccagcctggtagtcaccgtcttcaagacggaactccataacagtgcgaccagctgcaacgtttgctttagcgaagtggcctgcttgagcagcagtcacacgcgaagcacgacgctcgccgacagtgacttgcactgcacgatagccatcggtttcttcagttttgaactgggtgacgcgattcggctcgatctcaatgaccgtgaccggaatggagacaccttcttcggtgaaaatacgggtcataccgcatttacgaccgactacaccaatagtcatgttgtaaacctcatgagtgtacggggctttcacccgctatggccgcccatttcagagcgttacacgactaagacccgagtcttagccgaggctgatctgtacttccacaccggccgccagatcgagcttcataagtgcatcaacggttttatccgttggctggacaatgtccagtacgcgcttatgagtacggatctcgtactggtcacgcgcgtctttgttgacgtgcggggagaccagaacggtgaaccgctctttacgggtaggcagtggaattggaccacgcacttgtgcaccagtacgtttcgcggtttccacgatttcctgggtggattggtcgatcaggcgatggtcaaaagccttcaacctgatacggatttgctgattttgcattggatttcagactccggctgctattcccagcgagcgcaatacgcccgttaaaaggaggcgcaattctatagacggccctgataggtgtcaacccaataaaaaaggcccccgctgagcgggggccttttcaaaacatcagagctatctcagaagagataattactcgatgattttagctacgacgccagcaccaacggtacggccgccttcacggattgcgaaacgcagaccgtcttccatagcgatggttttgatcagggtgacaaccattttgatgttgtcgcctggcattaccatttctacgccttccggcagttcgcagttaccagtcacgtcagtagtacggaagtagaactgtggacggtagcctttgaagaacggagtgtgacgaccgccttcttctttgctcagcacgtacacttcagcttcgaacttggtgtgcggcttaaccgaacctggcttaaccagaacctggccacgctcaacgtcgtcacgcttggtaccacgcagcagaacgccgcagttctcgccagcacgaccttcgtcgagcagcttacggaacatttcaacaccggtgcaggtggtgacggtagtgtcacgcagaccaacgatttccagtggatcttgaaccttgacgataccgcgctcgatacgaccagttacaacagtaccgcgaccggaaatcgagaatacgtcttcgattggcatcaggaacggcttgtcgataacacggactggatctgggatgtagctgtccagagtctcaaccagcttacgaacggacgtggtgcccatttcgttgtcgtctttgccttccagagccatacgagcagaaccgatgatgatcggagtgtcgtcacctgggaagtcgtaagtgctcagcagatcgcgcacttccatctcaaccagttccagcagctcagcgtcgtctaccaggtcagccttgttcaggtaaaccacgatgtacggaacgcctacctggcgggacaacaggatgtgctcacgggtttgtggcatcggaccatcagcggccgagcaaaccaggatagcgccgtccatttgagcagcaccggtgatcatgttcttcacatagtcagcgtgacctgggcagtcaacgtgagcgtagtgacggatcagcgagttgtattcaacgtgcgcggtgttgatggtgataccacgagctttttcttctggcgcgctgtcgattttatcgaaatcaacgattgcggaaccgaaaacttcggagcaaacgcgagtcagagcagcagtcagagtggttttaccgtggtcaacgtgaccgatggtgccaacgttgacgtgcggtagggaacgatcaaatttttctttagccacgacaattaactccttgcctaaaggactgaatcagccttgttttttggatacagtttcagcgatgtgcgccggagctgtgttgtattttttgaattccatagagtagcttgcgcgaccctgggacatggagcgaacgtcggtcgcataaccgaacatctcacccaacggaacctcggcgcgaatcactttgccggaaaccgtgtcttccatacccaagatcatgccgcgacgacggttaaggtcgcccatgacatcacccatatagtcttcaggtgtaacaacttctaccgccatgattggctcaagcaactcaccaccgcccttctgggccagttgcttggttgccatggaagcagccaccttaaacgccatctcgttggagtcgacgtcgtggtaagaaccgtcaaaaacggttgctttcaggccgatcagcggatagccggcaacaacaccgttcttcatctgctcttcgatacccttctggatagcagggatgtattccttaggaaccacaccacctactacttcgttcacgaattgcagaccttcctgaccttcgtcagcaggagcaaaacggatccagcagtgaccgaactgaccacgaccgccggactgacgaacgaacttgccttcgatttcacagtttttcgtgatgcgctcacgataggaaacctgaggcttaccgatgttggcttcgacgttgaactcacggcgcatccggtcaaccaggatgtccaggtgaagctcgcccatgccggagatgatcgtttgaccagtctcttcatcagttttgacgcggaaagatggatcttcctgagcaagcttgcccagagcgatacccattttttcctggtcatccttggtcttaggctctacggcaaccgaaataaccggctccgggaagtccatgcgaaccaggatgattggcttggcagcgtcgcacaaagtctcacccgtggtgacgtccttcatgccgatcagggccgcgatgtcaccagcgcgcacttccttgatctcttcacgggcgtttgcgtgcatttgcaccatacgacccacgcgctctttcttgcctttaaccgagttgatcacgccgtcgccggaggccaacacgcccgaataaacgcggacgaaggtcaaagtacccacgaatgggtcggtagcgatcttgaacgccagagccgagaacggctcgctgtcatcggcgtgacgctccatttcttcttcctcgttatcagggttggtacccttgatagcaggaatgtcggttggagccggcaggtagtcgataacggcgtcgagaaccaggggaacacccttgttcttgaaggaagaaccgcaaacagccaggacgatctcaccagcgatagtacgctgacgcagagcagccttgatttccacgttggtgagctcttcaccttcgaggtacttgttcatcagctcttcgctggcttcggccgcagcctcaaccatgttgttgcgccactcgtcagccagttcctgcaactctgcagggataggcttgcgaacaggaaccatacctttgtcggaatcattccagtaaacagcttccatgttgatcagatcaatctgaccctggaagttgtcttcggaaccgatagccaattggattggcaccggggtgtgacccagacgctgcttgatctgaccgatcacgcgcaggaaattggcaccagcacggtccatcttgtttacataaacaagacgtggaacgccgtacttgttggcttggcgccatacggtttccgactgaggctcaacacccgaagtaccgcagaacacaacgacagcgccgtcgagtacgcgcagggaacgctcaacttcaatggtgaagtctacgtgacccggggtatcgattacgttgaagcgatgctcgtctttgtactgcttctcggaacctttccagaaggcggtaatagcagcagaagtaatggtaataccacgctcctgctcctgaaccatccagtctgtggtcgcggcgccatcatgcacctcgcccattttgtgacttttgccggtgtaaaacagtacgcgctcggtggtggtggttttaccagcatccacgtgagcaacgataccgatgttacggtagcggctaatcggagtagtacgagccataaagccctcgcaaaattagtgaagctaagattagaagcggtagtgcgagaaagctttgttagcttcagccatacggtgcacgtcttcacgcttcttaacagcagcacctttaccttcagcagcgtccaacagctcgccggccaaacgcagagccatagacttctcgccgcgcttacgggcgaagtctaccaaccagcgcattgccagagcgttacgacgggacgggcgaacttcgaccggaacctggtaagtagcaccgcctacacggcgcgacttcacttcgaccagcggagcgatggcgtcgagagctttctcgaagatttccaggggatcgctgttcttgcgttctttaaccttctccagcgcgccataaacgatacgctcggcaacggctttcttgccgctttccatcacgtggttcatgaacttggccaggatttggcttccgtattttggatcgtcaagcacttcgcgcttggctgctacgcgtcttcttggcatggataagccctcaaacggtcttcaggttcgctcggaatcggtgccctttcgggacgcctccgaccttactcttatcgactcagaaaataagatgattcagtgttacaaaaagccgctactacttaggcttcttggtaccgtacttcgaacgaccctggttacgacctttaacgccggaagtatccaaggagccgcgtacggtgtggtaacgaacacctggcaagtcttttacacgaccgccgcggatcagtaccacgctgtgctcttgcaggttgtgaccttcaccaccgatgtacgaggaaacctcgaaaccgttggtcaggcgcacacggcatactttacgcagtgccgagttaggttttttcggcgtagtggtatacacgcgagtgcatacgccacgacgttgcgggcagttctgcagcgcaggcacgtcggatttctcgacgatacgcttacgcggctgacgtaccagctggttgatagttgccatctactagctccactgttgtcttgcgacgctattgtcttgcaagaaaagcaaaatggcaggaacgaattcccgccaaatttaggggtacaagagtctaaagaggatcttgtccccagtcaaggcaaggccccgacctcccctctcatcgaaccgggacaaaactgcctcgatccgacgaatgggggctgccagggcccggacttatttatcgcagaactcagttaccgctggagttcagcgcttcggtcagtgcagcttccacttcactggcgcttacgcgcaacggcttgtcagcatcacggcggcgcttacgctcgctgtggtaagccaaaccggtaccggctgggatcaaacgacccacaactacgttttctttcaggccgcgcaggtaatcgcgcttgccggttaccgctgcttcggtcagtacgcgggtggtctcctggaaagaggccgccgagatgaacgattcagtcgacaacgacgccttggtgatacccaacagcacgcgagtgaacttggacacgaatttgtcttcggtcgccaagcgctcgttttccaccagtacgtgagtcagctccatctggtcgcccttgatgaaactggaatcgccggattcagcgatttcaactttacgcagcatctgacgcaggatggtctcgatgtgcttatcgttgatcttcacgccttgcaggcggtaaacgtcctggatctcgttaacgatgtacttggccagcgcacttacacccagcagacgcaggatgtcatgtggatcgcttggaccgtcagagataacttcgccgcggtttacctgttcgccttcgaagacgttcaggtgacgccacttcggaatcagctcttcatacggatcgctaccgtcgttcggggtaatgaccagacggcgcttgcccttggtttccttaccgaacgcgatggtgccgctgacttcagccagaatcgacgcttctttcggacgacgcgcttcgaacaagtcggcaacacgcggcagaccaccggtgatgtcacgggttttcgaagtttcttgcgggatacgcgcgataacatcaccgatggcgatcttcgcaccatccgctacaccgaccagggcgttggctggcaggaagtactgagcgattacgtcagtgcctggcagcaacagatccttgccgttgtcatcgaccatcttcacggctggacggatgtccttgccggcagctggacgatctttcgcgtcgagtacttcaatgttggtcataccggtcaattcgtcagtctgacgcttgatcgtgatgccttcttccatgcccacgtaggtcacggtacctttcatttcggtaacgattgggtgagtgtgcggatcccacttggccacgattgcgccagcgtcgaccttgtcaccttctttaaccgaaatcacagcaccgtacggcagcttgtaacgctcacgctcacgaccgtagtcatcagcgattgccagctcaccggaacgggacacagcaaccaggtggccatccactcgctcaacatgtttcaggttgtgcagacggacagtaccgccattcttcacctgaacgctgtcggctgcggaggtccggcttgccgcaccaccgatgtggaatgtacgcatggtcagctgggtaccgggctcaccgatagactgggcagcgataacgccgaccgcttcaccgatattcacctggtgaccacgagccaagtcacggccgtagcatttggcgcagatgccgtagcgggtttcgcagctgatcggcgagcgaacgatcacttcgtcgatgctgttgagttcgatgaactcgacccacttctcatcaaccagggtgccggcaggaacgataacttcctcggtacctggcttgaatacatcacgggcaataacacgacccaatacgcgctcacccaacggctctacaacgtcaccgccttcaatgtgcggcgtcatcagcaggccatgctctgtgccgcaatcgatctcggttacaaccagatcttgtgcaacgtctaccagacggcgagtcaggtaaccggagttagcagttttcaacgcggtatccgcaagacccttacgagcaccgtgagtcgagatgaagtactgaagtacgctcaaaccttcacggaagttcgcagtgatcggcgtttcgatgatggaaccgtccggcttggccatcaagccacgcataccggcgagctgacggatctgcgcagcagaaccccgtgcgcccgagtcggccatcatgtacatcgagttgaaggactcttggtcaacttcgtcgccgtgacggtcgatgactttctctttcgagaggttggccatcatcgccttggaaacttcgtcgttcgccttggaccaaaggtcgattaccttgttgtacttctcgccctgggttaccaggccggaggcgtactggctttcgatctctttcacttcatcagtggcagcactgatgatgcgggctttttcatccgggataacgaagtcgttaacaccgatggaaacgccagaaatggtcgaataggcaaaaccggtgtacatcaactggtcagcgaagatcacggtctctttcaaaccaaccacgcggtagcactggttgatcagcttggagatcgccttcttcttcatcggcaggttgacgacgtcgtacgacagaccttttggcacaacctggtacaacaacgcacggccgacagtggtgtcgacaatacgagtgttgctcacgctgccgccatcacgatcgttgacggtttcgttgatccgcactttgaccttggcgtgcagtgcggcttcgccggcacggaacacacggtcaacttcttgcaggtcagcgaacacacgaccttcgcccttggcgttgatcgcttcacgcgtcatgtagtacagacccaatacaacgtcctgcgacggaacgatgattggctcaccgttggctggcgacagaatgttgttggtcgacatcatcaacgcacgcgcttccaactgggcttccagtgtcagcggtacgtgcacggccatttggtcgccgtcaaagtcggcgttgtacgcagcacagaccaacgggtgcagctggatagccttaccttcgatcagtaccggttcaaacgcttggatacccagacggtgaagggtcggtgcacggttgaggagaaccgggtgttcgcggatcacttcggcgagaacgtcccaaacctctggcagttcgcgctcgaccattttcttggcggctttgatggtggtcgcaagaccgcgcatttccagcttgccgaagatgaatggcttgaacagctcaagtgccatcttcttaggcagaccgcactggtgcagacgcagggtcgggcctacggtaattaccgaacgaccggagtagtcaacacgcttaccgagcaagttctgacggaaacgaccttgcttacccttgatcatgtcagccagggatttcagaggacgcttgttcgaaccggtgatagcgcggccacgacgaccgttgtcgagcagggcatcgacagcttcttgcaacatacgcttttcgttgcgcacgatgatgtccggagcggacagatcaagcaggcgcttcaagcggttgttacggttgatcacgcgacggtacaggtcgttgaggtcggaagtcgcgaaacgaccaccatccaacggtaccagcggacgcaggtctggcggcagaaccggcagaacggtcagcaccatccactctggcaagttgccggaaccctggaaggcttccatcaacttcagacgcttggacagcttcttgatcttggtttcggagttggtttgcggaatctcttcacgcagacggccaatctcgtgctccaggtcgatagcgtgcagcagttcgcggacagcttcggcacccatgcgggcatcgaaatcatcgccgaactcttccagcgcttcgaagtactgctcgtcgttcagcagttgacctttttcaagggtggtcatgcctggatcgataacgacatagctctcgaagtagagaacacgttcgatatcacgcagggtcatgtccatcagcaagccgatacgggacggcagcgatttcaggaaccagatgtgggcaaccggcgaagccagttcgatgtgcgccatgcgctcacgacgaaccttggccagtgcaacttcaacgccgcacttctcgcagatcacaccacggtgcttcaagcgcttgtacttaccgcacaggcactcgtaatccttaaccgggccaaagatcttggcgcagaacaggccgtcacgctcaggtttgaacgtacggtagttgatggtttccggctttttaacttcaccgaacgaccacgaacggatcatctcaggcgatgccaacccaatacggatggcgtcgaactcttcgacttgaccctggtttttcagcaaattcagtaggtctttcaaggcctttcctcctggcggagcagagagcgggctaaacagccccgctctcgattcgcgtcacgtgttattcggtttccagatcgatatcgatgccgagggaacgaatttctttgatcaacacgttgaaggactcgggcatgcccggctccatacggtgatcgccgtccacgatgtttttgtacatcttggtccgaccgttcacatcgtccgacttcactgtgagcatttcttgcagagtgtaagcagcaccgtatgcttccagtgcccagacctccatctccccgaaacgctgaccaccgaactgagccttaccacccagcggctgctgggtaaccaggctgtacgaaccggtagaacgagcgtgcatcttatcgtctaccaagtggttcagcttcagcatgtacatgtagccaacagtaaccggacgctcgaacttgttgccggtacggccgtcgaacagctgcatctggccgctttctggcaggtccgccagtttgagcatggccttgatttcgctttccttggcaccgtcgaacaccggggtagccattggaacaccgccgcgcaggttcttcgccagatccaggatttcctggtcggagaaggtgtccagctcttcgttgcgaccgccgatctcgttgtagatctcgtgcaggaacttacgcaggtctgcaaccttgcgctgctcttcgatcatacggttgatcttctcgcccagacctttggccgcgaggcccaggtgagtttcaaggatctgaccaacgttcatacgcgaaggtacgcccaacgggttgaggacgacgtcgaccggggtgccattggcatcgtgcggcatgtcttcaaccggcatgatcacggagaccacacctttgttaccgtgacgaccggccatcttgtcgcccggctggatgcggcgacggattgccaggtaaaccttgacgatcttcagcacgcctggagccaggtcatcgccctgctgcagtttgcgcttcttgtcttcgaacttgtcgtccagcagacggcggcgatcaacgatgtaggcctgggctttctcgagctgctcgttcagagcatcttcagccatgcgcagcttgaaccactggccatgctcaagaccgtcgaggatttcgtcggtgatgtcctgacctttcttcagacctgcgccgccttcagccttgtggcctaccagggcagaacgcagacgttcgaaggtcgcgccttcaacgatacggaactcttcgttcaggtccttgcggatctcgtcgagctgggtcttctcgatggacagtgcacgagcatcacgctcaacgccgtcacgggtgaagacctgtacgtcgatgacagtacctttggtaccggtaggtacacgcagggaggtgtctttaacgtcgctggctttttcaccgaagatggcacgcagcagtttttcttccggggtcagttgggtctcgcctttcggagtgaccttgccgaccaggatgtcgcctgcgcctacttcagcacctacgtaaacgataccggcttcgtccagtttgttcagtgcagcttcacccacgttcgggatgtctgcagtgatttcctctgggccaagcttggtgtcacgggccacacaggtcagttcctgaatgtggatcgtggtgaagcggtcttcttgaacgacacgctcggacaggcagatggagtcttcgaagttgaagccgttccatgccatgaacgcgatgcgcatgttctgacccagtgccagttcacccatgtcggtggacgggccgtcggccatgatatcgctacgctgaacgcgatcacccttgctcaccagcggacgctggttgatgcaggtgttctggttcgagcgggtgtatttggtcaggttgtagatgtcgacaccggcttcgccagtttcaacttcgtcatcggcaacacgaaccacgatacggctggcatcaacggagtcaattacgccgccacggcgagccacgacgcaaacgccggagtcacgggctacgttacgctccatgccggtacctaccagcggcttgtcagcgcgcagggtcggtacagcttgacgctgcatgttggaacccatcaacgcacggttggcgtcatcgtgctccaagaacgggatcagcgacgccgctaccgaaactacctgcttcggcgaaacgtccatcaaggtgacgtcttccggcgccttgacggtgaactcgttcaagtgacgaaccgctaccagctcgtcgatcaggactttcttgtcgttcatcgtggccgaagcctgagcgatcacgtgatcagcttcttcaatggcggacaggaacacgatctcgtcggtgaccagagcgtctttcaccactcggtacgggctctcgaggaagccatactggttggtgcgcgcataagcggccagggagttgatcagaccgatgttcggaccttccggcgtttcgatcgggcaaacacgaccgtagtgcgtcgggtgtacgtcacgaacttcaaagccggcacgctcacgggtcagaccgcccgggcccagtgcagaaacacggcgcttgtgggtgatctcggagagcgggttgttctggtccatgaactgggacagttggctggaaccgaagaactctttcaccgccgcagccactggcttggcgttgatcaggtcttgcggcatcaggccttcgctttcagccatcgacagacgctctttgaccgcacgctcaacacgtaccaggccaacgcggaactggttctcggccatttcgcctacgcagcgaacacgacggttacccaggtggtcgatgtcatcgacgatgcctttaccgttacggatgtcgaccagggtcttcagtaccgcgacgatatcttccttgcacagcacgcccgaaccttcgatttcggtacgaccgatacgacggttgaacttcatccggccgaccgcagacaggtcatagcgctcagggctgaagaacaggttgttgaacagggtctcggcagcgtctttggttggcggctcgcctggacgcatcatgcgatagatctcgaccagcgcttccaattggttgctggtggagtcgatcttcagagtgtcggagatgaacggaccgcagtcgatgtcgttggtataaagggtctcgatgcgaacgacctgagccttggcgattttggccaggatctcggtgttcagctcggtgttgcactcagccaggatttcgcctgtcgccgggtgaacgataaccttggcggtagtgcgacccaggacgtagtccagaggcacttccagctctttgataccggctttttcgatctggttgatgtggcgcgcagtaatacgacggccagcctcaacaatgaccttgcctttttcatcctggatgtccaggacggcaatttcaccacgcagacgcgaagcgatcagctccagcttgagggtttcatccttcaggctgaatacgttggtggtgtagaaggcgtcgagcacttgctcagtggtatagccgagcgcgcgcagcagtaccgaggccggcagcttgcgacgacggtcgatacgcacgaacacgcagtctttcgggtcgaactcgaagtccaaccacgaaccacggtacggaatgatccgcgcggagtacaggagcttgccggagctgtgcgtcttgccgcggtcgtggtcgaagaacacgcccggggaacggtgcagctgggaaacgataacacgctcggtaccattgattacgaaggtaccgttctcagtcatcaatgggatttcacccatgtagacttcttgctctttgatgtccttgatcgctttgttcgacgattctttgtcgaaaatgatcagacggacttttacccgcaaaggtacggcgtacgtaacaccgcgcaacacgcattctttgacatcaaatgccggttcgcccaggcgataaccgacgtactccagcgcagcattgccggagtagctgatgatcgggaaaacggatttgaaggccgcatgcaggcccacgtcgcggaactgatctttggtcgctcccgcctgcaagaattcacgatacgaatccagctggatagccagaaggtacgggacatccatgacgtccggcaacttgctaaagtccttgcggatacgttttttctcagtatatgagtaagccatcagcgttccccagcttggtcacctgcttgtttggcccctccgacgggagcagccagaaaatcttgcaaaccccatggtttgcaccaccgcatcgggtggttacagcgcgttattggcggcgaccgagtcgacagccaagaacggaaaaaggccggtggcaagagccaccagccatcagccttcagcttaacgcttgggctggagacgcaaggtcgatgcttacttcagctcgactttagcgcctgcttcttccagcactgctttcgctttgtcagcggcgtctttcgacactgcttccagaacctgggcaggagcgccgtcaactacagccttggcttctttcaggcccagaccggtcagttcacgtactgccttgatcacgtttactttcttctcgccagcttccagcagcatgacgttgaattcggtttgctcttcagcagcaacagcagcaacagctgggccagcggaagcagcggcagcggaaacgccgaatttttcttcgaaagctttgatcagctcaacaacctgcagaaccgacatttcagctacggcgttgaggatatcgtcttgggagatagacattgctgtatttcctgaattgggggacggcctactcggccatcgaaataaacaaaaatacgcgagagaagtcgctcagccttaggctgcggcagcttctttttgctcgcgaactgcggccagagtacgagccagcttgctggtagcgccttgaatcacgctcatcagctgcgaaatggcttcgttgcgggtcggcagtgttgccagtacgtcgatttggttagctgcgaggaacttgccctcgaacgcagctgccttgatctcgaacttatcctgactcttggcaaattccttgaacaaacgggcagcagcgcctggatgttctttggagaacgcgatcagagtcgggccggtgaacacgtcgttgaggacactgtattcagtgtcagcaacagcgcgcttgagcagggtgttacgtacaacacgtacgtatacgccagcttcacgagcctctttacggagtccggtcatagcgcctactgtcacaccacgggcatcagccacgacagcggacagagcagctttggcagcctcgttgacttcagcgacgatggccttcttgtcttcgagattaattgccacgggtttaactcctgcttgttaccgtttcatctggccgaagccggatgtcgttttggtgtctgattcggtaaggaaccgggagcaccatctgcgtaggcttgtggtttaagacttgcgtcgcctacggtcttggatagcccccgccaggcagggaccccaattttttcaattggcgcgatcgctcgcaccaatttgtgtcttatacgtccagcgagccttggtcgatgaccagacctgggcccatagtggtgctcagggtaacgcgcttgacgtagatacctttcgaagaagctggcttgatacgcttcagatcagcgatcagggcttcaacgttttccttcaacttgacggcatcgaagccgactttgccaacggaggtgtgaatgatgccgtttttgtcagtgcgataacgaacctgaccagccttggcgtttttgaccgcagtggctacgtctggcgttacggtgccgactttcgggttaggcatcagaccacgtggacccaggatctgacccaactgacctacaacacgcattgcatccggggatgcaataactacgtcgtagttcaggtcgccgcctttcatttcggcagccaggtcgtccatgccaacgcgatcagcgccagcggccagagcagcttcagctgccgggccttgggtgaagacagctacacgtacagtcttgccagtaccgtgtggcagcacagtagcgctacgaacgacctggtcggatttacgtgggtcaacacccaggtttacagcaacgtcaacggactcgctgaacttgacagtcgacagctcggtcagcagggcagcggcgtctacaaagttgtaggccttgcctgcttcgattttgccggcgatagccttttggcgcttggtcagcttagccattacacaccctccacgttaaggcccatgctacgagcagaaccggcgatggtacgcacggctgcatccatatcagctgcagtcagatccgcgtttttggttttcgcgatttcttccagctgagcacgagttacggtgccaaccttaacggtgttcggacgagcggaaccgctagtcagaccagcagctttcttcaacagaaccgaagccggagtcgacttggtttcgaaagtaaagctacggtcgctgtatacagtgatgatcactggagtcggcagacctggctcaagaccctgagtacgggcgttgaaggccttgcagaattccatgatgttcacgccgtgctgacccagagctggaccgacgggtgggctagggttggcctgagcggccttcacttgcagcttgatgtaagcggtaatcttcttggccatgaggcactccaattacgggttcgaacgcctcgaaaggctccccggttacttgcgcgtttatcccagtgacgacaaaaccccacagcctaaggctgtggggttgggatgcttgctcagctagaccttctcgacctggctgaactccaactctaccggagtagagcgaccgaaaatgagcactgccacttggatccggctcttttcgtagttaacttcttcgacagtaccgttgaaatcagcaaacggaccatctgtaacacgaacaacctcacccggctcgaaaagcgtcttcggcttaggcttgtcgctaccatcagcaacacggcgcagaattgcttccgcctccttgtcagtgataggagcaggcttatcagcagttccgccgataaaacccatgacacgaggagtgtccttgaccaaatgccaagtaccttcattcatgtccatctgaaccagcacatagccagggaagaacttgcgttcgcttttgcgcttctgaccattccgcatttcaaccacttcttcagtgggaaccagaatttcgccgaagccatcttccatgcctgccagctttacgcgctccagcaaagagcgcataacatgcttctcgtaacccgagtaagcatgcacaacgtaccaacgcttagccacgggacacccttagccaacaatcaaggaaacaagccagccgagcagggaatcgagcccccacaacagcaacgccataaccagaacaacagccacgacaatcaatgtggtctgcgtagtttcttggcgagtcggccaaacgactttacggatttcggtgcgagcttcctttaccaggaccgcgaaagacttgcctttggcagtctgcaggcctacaaaggcagctacagcagcgagaacaagcaaagcgagtacgcggtacaggatcggcgaagcagaatagtactgattgccaacaacgcctacgaccaccaaggcaaccacagcgagccacttgaccagatcgaaacgagagctttgagcttcagccttaggagtcatctatgaagatcctgtgaaaagaaagccagacacaccacgtgaatctggcaggtcaggagggaatcgaacccccaacctacggttttggagaccgtcgctctgccaattgagctactgacctaaaacaaaatcaggccgaccattatgcaggcctgaaaaagactttacaacaaccaaccccactagacctgaaatcacctggcaacaacgccagacagaacaccttcaagccgaggcagctgttaaaacaaaggcagatattttcatatctgccttgttatatggagctcttgagcggatttgaaccgctgacctcacccttaccaagggtgtgctctaccaactgagctacaagagcaaaacacctgcacaacctgcaaacttggagcgggtagcgggaatcgaacccgcatcatcagcttggaaggctgaggttctaccactaaactatacccgcggagcttgcagctcacgctaaaaatggtggagggggaaggattcgaaccttcgaagtcgtagacgtcagatttacagtctgatccctttggccgctcgggaacccctcctaagcgagccggcattttacattacgccgaccttctgtcaagcattttctcatttaaaaatatgaggttagctgcattgaccttcgcttcacactattgacctagaaggtcttcactgcgaagcgggcgccattctatgcaaactattcgagagttgcaacgccttcgcacaacattattttatgttttaactcattgaattccttagcaaggttttcaaagggcagatcgtcagccaggcgtcgactttcaggggctacacgcagccagtagccagaggcatcagccgtattgagcaactggaccttgaccttgatatccaagctcgtgagtcgctgctcaacggactgcgcctggcgctggtccgcaaaaccaccgatgtacaggcaagtgttttgcgcctcggatgtttttgcgcgatccctgcgcaccaccgcatcagaagattcactgagtagtcggatgtcttgctgcgagcccttgtaaaggctcaagggcgtgacatccttagcgcgcaatggcgcttcttgctggtgccagatgtagtagaaggcgttgagaaccagtaaaagcaaaaacagccaacgcataatcacctcaggacaaaggacaagccatcgccaaaccgacaaagaccagatcgggcacgagccgcgcctggggcaccgcatccgctaccaaatcagcatccccgccggtcaggaacacggtaaagtcatccccccagtagctcctcgccaactccaactgagtcagtacaaaccctctgagcatcaacgtacagccgcgctcaacggcttctaccgtcgtacggcccggagagagacgctccagcgccctttcagcggcagcgtcgtcgtagcgtatcttgcgcgtgtgggttcgcaactgattgcgcataaggggcattccaggacaaatgaacccacccaagtgctcaccgtccacagcaataaaatctgcagtggcggccgtaccaaaatcaagcaccaggcaggccccacgcgcgagcttgaacccacccagcatcgccagccagcgatcaagcccaagacgttcgaaatcttcgtatccgttgcgcactcccgccatttctcgcgccggggccgcgcaggaaacgataacgccgaaagtgtcttgcaaggcagtgaccaacttgcttgtttcttccagggcacgaacgcttaccaatcggcaacgtgtcagtagaagcccagaaagcgctaccaggctctcaatcaacgccagatccgagcctacaaccccttctgcggaggtattcgccgattccgaatcaagcacacgccatttgataaagctatttccacagtcgagctcaagaatcatcacgcaacctcaggcttaactcaccaccactgtatattttctcaacaccattaacactcaagcgcaatgccccctggcgatctacacccagcacaaccccatcgacctggttgacacccgcggtaagggagaccggccggccctgccaggcgtgattctgctcccactctccctgaagcgcgacaaaaccgccttcccgatgccgctcaaggtagccttgcagctgccgccccagttccgacaccagaagattgcgattcaccggagcacccgtctcaagttgcactgaggtccattgctgatcaacctcatcagccctctgcatattcacgttgatacctattccgagaactacgtgacagatatccgcaggatcacctaccaactccagcaaaattccagcgattttcttctgccctaccaaaacatcgtttggccacttcagggcggcgccctgcaccccggactcgcgcaaagcctgcatgactgccaagcccacaaccaggctcagcccctccagctgtcgcagacctgactcaatacgtaaaacgagactgtaataaacgttttgcgcgaacgggctgatccactttcgtcccctcctacctcttcccgcagtttgttgctctgcgagcaccaggaacggcgccgcgcatccagcgtctaccagccgcaaagcttcagcattagtggagtcaatggaatcagatatatgaacgggccatgtcaaggatggcgtactctgcgaaatatcttcagcactcaagaacactagtggggatgccaattgataccccttgcctcgcaccttgtgaattggcagattcaactctgcctccaggtgctggagttgcttccatacagcactgcgactgacgccaagagcggcacccagtgcttctccggaatggaatcggccatctttcagaagtttcaacaacgtcagcatgcaagtatcgcctcacaatgaggcacgcatgatagccatgcgcagggtcattgcatagaaaggccggactttagcgctggaggccacgcacgcggatctcttcgcacttttcgaccgcccaaaacaaaacccctgactgcataagcaatcaggggttctggaatttaatcttgacgatgacctactctcacatggggaaaccccacactaccatcggcgatgcatcgtttcactactgagttcgggatgggatcaggtggtt

SEQ ID NO: 17 - DNA, 64291 bp, Pseudomonas nodulensis
cgctttcgaccgagaggatcgaaacgttaatagagccagacaacactgctctaccaactccttctgggcttcgatgaactgaagcaagtcgctgtcgaattctgcgtaactctttgtttgccaaggagttttccgtttcgactgcgccggaagtggggcgaattatagacagatataattcgccgtcaacacctaatttcagttttattcggatttgagcgtaatacgcgcaaatgccttcttcccagcctgacaaatgtgggtagcacccagctcgtatataaaggtgcgatccacaacctcaccatctatacgcacaccacccgaccccagaaggtcgcgcgcaactgccgagttcttaaccaggcccgccttattaagcacagcagcaatcggcatcgcctcggcagcagacagctcgatctccggcagatcatcaggcagctcgccatccttcatgcgattacccgcagcacggtgagcgttggccgcagcctcttcaccatggaaccgcgcaacaatctcttccgccagcttaatcttcacgtcacgcggattagcgcctgcctctacatcagcacgcagcgcattgatttcatccatcgaccggaagctcagcaactcgaagtaacgccacatcaaagcatcaggaatcgaaaccagcttgccgtacataacgcccggcgcttcctggataccgacatagttccccagggacttggacatcttcttgacgccatccaacccttccaacaacggcatggtaaggatgcactgggcttcctgcccatatgcacgctggagctcacgccccatcaacaggttgaacttctgatcagtgccgcccagctcaacgtccgcacgcaacgctaccgagtcatagccctggaccaacgggtagaggaactcgtgaatggcgatcggctgattggtggagtagcgcttgtcgaagtcatcacgctcaagcatgcgcgcaacagtgtactgagaggtcaagcgaatgaagtccgccggccccatctgatccatccaagtggagttgaacgccacttcggtcttggccggatcaagaatcttgaatacctgagtcttgtaggtctcggcattatcaagcacctgctcacgggtcagcggcggacgcgtggcgctcttgccgctcggatcaccgatcattccggtgaagtcacctataaggaagatgacctggtgccccaactcctggaactggcgcagcttattaataagcacggtatgccccaggtgcagatccggcgcagtcggatcaaagccagccttaatacgcaggggctgaccacgcttgagcttttcgatcagctcagcttcgaccaacagttcttccgcaccacgttttatcagcgctagctgctcttcaaccgacttcataacagacccgcaaggctcagattcaaaagggaaccaaccatacaagatcagggactaattacaagttttgccctgcgaacggacaccgttcagcaagcccagcgttcgcgagcttgcgccacagatgatttggttatattttatacagttatttcatcttcatcatgtcattcatcttttccatttcatcttcaaagtcaaaattacctatgaccactgaaccgtctaaagcgccgccgctttacccgaagacccacctgctcgccgcaagtggtatcgccgcccttctcagcctggcactcctggtattcccttccagtgacgtagaagccaaacgaacatccctgagccttgacctggaaagtcccgttgaacaactgacacaagatcaagacgcttccgacgcgcaacaagccacaaaccttggcaccgagtcgccgttcgcacagatagaaaacagccccgaagacacccagcaagcagctcaaagcccatctgcgcctgttgccgacacggccaagaacccccagcaccgcgaagtgatcgtggccaagggcgacacactgtcgacactcttcgagaaggtcggcctccccgccgctacagttaatgaagtgcttgccagcgacaaacaagccaagcagttcacccaactcaagcacggccagaagctcgaatttgaattcacccccgatggccaactgaacaacctgcacagcaatgtcagcgacctcgaaagcattactctgacaaagggtgccaaaggctttgccttcaatcgcatcaccaccaaacctgtgatgcgctccgcctacgtacacggcgtgatcaacagctccctgtcacaatccgccgcgcgggcaggcctgtcccacagcatgaccatggacatggccaacgtgttcggctacgacatcgacttcgcccaggacatccgccagggcgacgaattcgacgtaatctacgagcagaaagtcgccaacggcaaagtcgtcggcaccggcaacattctctccgcacgtttcaccaaccgcggcaagacctacaccgccgtgcgctacaccaacaaacaaggcaacagcagctactacaccgccgacggcaacagcatgcgcaaggcctttatccgtacgccggtggacttcgctcgtattagctcgcgtttctccatgggtcgcaagcatccaattctgaacaaaatccgtgcccacaaaggggtcgattacgccgcaccgcgtggcacgccgatcaaggcagccggtgatggtaaagtcctgctggcagggcgtcgtggtggctatggcaatacggtgatcatccagcacggcaatacctaccgtacgctgtatggccacatgcaaggctttgccaagggcgtgcaaaccggcggcaccgtgaaacaaggccaggtgattggctatatcggcactaccgggctgtctaccggcccgcacttgcactatgagttccaggtcaatggcgttcacgtcgacccactgggccagaaactgcccatggccgacccgatcgccaaggctgaacgcgcccgcttcatgcaacagagccagccgttgatggcgcgcatggatcaagagcgctccaccctgctggcttcggcgaagcgttaagtatggcgctctatatcggtgtgatgtccgggaccagccttgatggcctggacatcgccttgatcgagcagtccccggcgatcaagctgatcgccacacactacattcccatgcccgataccctgcgcaccgagctgcttgctctttgcgccagcgggccggatgagatcgcccgctcagccattgcccaacagaactgggtaaatctcgctgctcaaggtatccacgctttactcgaccagcaaaacctcaagccccaggacattcgcgcaattggcagccatggccagaccatccgccatgaacccgcccggggctttaccgtacagatcggcaacccggccttgctcaccgagctcacaggcatcaccgtggtcagcgatttccgtggccgcgacgtcgccgccggcggccagggcgccccattggtccctgcgttccatgaagcactgtttggcgagcacagcggtaaccgtgccgtattgaatgttggaggtttcagcaacctcagtctgattgagaccggcaaacctgtagccggcttcgactgcggcccaggcaatgtcctgctggatgcgtggattcaccagcaacgcggtgaacactttgatcgtaatggccagtgggcggctagcggcaaggtcgagcctgcgctactcaacgccctgctcagcgaccctttcttcgtgactacgggccccaagagcaccggccgcgaagtgttcaatctggagtggctgcaccaacacctgggtcgcttaccaacattcgagcctcaggatgttcaggccaccctgctggaactgaccgccctgaccatcatcgaatccctgcaggccgcccagccccagaccagaacactgctggtgtgtggtggcggtgcccacaacgccacgctgatgaatcgcctggccgccctgctaccgtcaactcaagtcagcagcaccgccgcctacggagtagatcccgactgggtcgaggccatggccttcgcatggctggcccattgctgtctcgaaggtatcgcagccaaccgcccaagtgtcacaggggcacgaggacttagggtactgggcgccatctacccagcgtaaaatctccagacagcaaaacgccgcttggcctatcacagccaagcggcgtttttgcgtccgctgtcgatcagatcgagaacgaagacccgcaaccacaggtggtggtggcattagggttcttgatcacaaaacgcgaaccctccagaccttcctggtaatccacctcggcacctgccaggtattggaaactcatcgggtccacaaccaggctcacgccttcgcgctcaacgatggtgtcatcatcggccacatcttcatcgaaggtaaaaccgtactgaaaccctgaacaaccgccgcccgtaacgaatacgcgcagcttcaagcgatcattaccctcttcatcgaccaggctcttcaccttgtgcgcagcaccgtgggtgaattgcaaagccgtgggggtgaaggattcaacgctcatgctgataatctcccggcgtagcgccgccatatgcgtaatgcccggcattatccgcttctcctagaaaagcggtcaactattgttacggtatatcaatctgcgctgtcgccattaaaaacacaaaaggcccgatcaacgggccttttgcttcgcgactcaacagccttaaggcagcatgcccgcgtgggacagccccaacttctcatccaggccaaacaggatgttcatgttctgcaccgcctgcccggacgcgcccttgaccaggttatcgatcaccgacaacaccacgaccaggtcaccatcttgcgggcggtgcacggcaatccggcacacgttggcaccgcgcacgctgcgggtttccggatggctgccggccggcatcacatcgacgaacggttcgttggcataccgtttttcgaacagcgcctgcaggtcgaccgagcgatcgaccacagtggcgtacaacgtggagtgaatgccgcggatcattggggtcaagtgcggaacgaaggtcaggcccacatccttcccagccgcacgacgcagcccctggcgaatttccggcaagtgacgatgcccctttaccgcataggccttcatgctttccgacgtttcagagtacagcgaaccgaccgcagcaccacggccggcaccgctgacgcccgatttgcagtccgcaatcaagcgcgaagcgtccgccagccccgcttccagcaatggcaggaagcccaactgtgtggcggttggatagcaacctggcaccgcaatcaggcgcgcttgcttgatctgttcacgattcacttccggcaggccgtacaccgcctcttccaacaactccggcgcgccgtgcggctggccgtaccatttggcccactcgtcagcgtcctgcagacggaagtccgccgagaggtcgatgaccttggtacccgcagccaacagttcaccggccaacgcatgggcaaccccgtgcggcgtggcgaagaacaccacatcgcaggcgcccaaggtcttgatgtccggcacgctgaacgccaggccgtcatagtggcctcgcaggttcgggtacatatcggccacggccagcccggcctcggatcgggaggtgatgaccactacctcagcttgcggatgctgagccaacagacgcagcaattcgacaccggtataacccgtgccgccgacgataccgaccttgaccataaacctgccctcaacgaacccactggaaagccgtcgataataggggccgtatcgtcctgcgacaaccgtcaacgtgacgtacgggcgcatgagccactactatctcggctaccgtgaacctgggaataactaaaaatgctttatctatgggtcaaagccttccatatcgtcagcatcgtctgctggtttgccgggctgttctacctgccacgcctgttcgtctatcacgcccaaagcgaggacaccgtcagcaaagagcgtttcagcgtcatggagcgcaagttgtatcgcggcatcatggggccggcgatgatcgccacgctgattttcggtggctggctgatctacctgaaccccagcatctttcattcgggcgggtggattcacgccaagctgaccctcgtcgtactgctcattggctaccaccatatgtgcggcgcgcaggtaaaacgcttcgcacgtggcgaaaacacccgcagccatgtcttttatcgctggttcaatgaagtgcccgttctgatattgctggctatcgtaattttggtcgtggtcaaaccgttctaacttcaattactcggggtacctccaatgtcgctgcccgctctgcttgaacaacgtctgcgcctgcccgtcgtggcggcgccgatgtttctgatttccaacccgcaactggtcctggcgtgctgccgcaatggggtggtcgggagtttcccggcgcttaaccaacgcgaaagcagtggcttcaaggcttggctggaggaaatcgaagcgggcctggcgctgctggacaaccctgcgccctacgccgtcaacctgatcgtgcacaacagcaatccccgcttggaggcagacctggcgatttgcgttgagcataaagtgcccatcgtcattaccagtctgggtgccgtcaaagagttggtggacgcggtgcatagctacggcggcctggtgttccacgatgtcaccacccgccgccatgccgagaaggctgccgaggccggtgtggatggcctgatcgccgtggcggcaggtgccggtggccatgccggcacctggagcccattctcgttgattgccgagatccgccagttcttcgacaaaaccctgctgttggccggctgcctcaaccacgggcacgagattctcgcagcccaactgctcggtgcagacctggcctatttcggcacgcgctttatcggcaccaccgaaagccatgcccctgatgcgtataaagagatgctgctcacatcgcgcgccgccgacatcgtgcacactcccgctgtctccggcgtacccgccagctttatgcgccagagcctggaaaacgccggtttcgacctcgccgccctgcaaggcaaaggtgaagtcaacttcggctccaagctcaagccgttgagcgacgaggctaaggcctggaagactgtatggtctgctggccaaggcgtcggtgagattgatgatttgcccagcgtcgatgaactcgttgcgcgcctggatgccgaataccgcaaggcacgcgaacaggcggcacaactgcgctggccacggtgacccaaccgccaggcctgccgactgaacaggcctgccctacctccctgaacaagtgacaaggaagcccgcatgagcgacaaccgtttcaagattgtgtttgatggagccttgctcccgggtgtcgaaagcaccacggccaaactgaacctggccgagctcttcaagagcgaagtcgaagccatcgagaagctctttaccggccgcccggttgcactcaagcgcgacctgtctcgcccggatgcggaaacctacctcaccgcgctgaaaaacgccggggtcgacgcgcgtatcgaacctgaacaacccgtggccttcagccttgccgagacccacgagacggactccggtccttctggcttcgcgcgaccggcggcgtcaccttatgctccgccccgggcgacggtaggtgatgatttgcccgagtacgcgaccctcaaagtcttcactatccatggccgcatcggccgcctgcgctacctggcatggaccctggtgttgaccctggcgatgctggttgcgggcggcatcatcagcaccgtcagctttgccgtggccaccgcgtcgccgattgcgggcaccatcatcggagtactactgggtctcgcgctgtttgtggcgctggtatgggtcagtgtgcagatcggcgtgcagcgcctgcatgacctgggctggtcgggctggttgtatctcctcaacctggtgccgctggtaaacagtgtcttcccgatcctgttgctggtattgccgggcaatgcgggcgccaaccagtacggcgcgccaccgccacgtaactccaccgcggtaaaagtcctggccacgctgtggttggcgtttattccggtcatgcttgccatcgtggtgaccttgggcatgaacggttacctggaccagctcgaagccaacgtggacagcagctacgaaagcagctccatcacctccgatgaagacgccgaccaagccaccaccgctgaagaagacgaagcgcagagtgctgacgaagcgggcgaacctgtagactctccagaacagtgaagaaacgcccccggcctgtaatgcctttgttacaggcgcggcggcgttgcgatggagaaaggcatgacccgttacgctctgatcaccggcgcctccagcggcatcggcctggccctggccgaagcactggcacgtcgcggccgcagcttgattctggtggcccgccagcgtgatcagttggaaagcattgcaatcgaattgactcaacgctttggcgtcgaggtgctgttccgggcctgcgacctgggcgagccgctgcgcttgtccgggttcctgctggagcttgaagaaggcgaacgtcagatcgacctgctggtgaactgcgccggtatcggcaccagcgggccgttcctggcccaggactggatgaccgaacaggacctcatggaggtcaacatcctggccctgacccgcatgtgccatgcgctcggcaatgccatggcgctgcacggcggcgggcagattctcaatgtggcatctgtcgcggcattccaacccggcccctggatgagtacctactacgccagcaaagcctatgtactgcacttctccgaaggcctgcgggaagaattgaagacctgcggcatcaaggtctcggtcctctgccccggcccgacgcgcaccgcattcttcggcaccgcacaaatggacaccgccaagctcgatcgcagccaacaattgatgagccccgaagaagtagcgctctacaccgtgcgcgccctggataagaacaaagccatcatcattcccggtcgtcgcaaccgctggatcgccttcagcccacgcttcagcccacgctggctgacccgcaagatcgccggcgccatcaacaaggcctattgcccgcgctgactggctgggtacactcaccctgcatactcataatggagaaacagctgtggatactctgttcaccaagatcatcaacagagaaatacccgcggacatcatctacgaagatgaccaggtcctggcgttcaaggacattcatccggcggcacctgtgcatttcctggtcattcccaagaagcacatccccaccctgaatgacctgaccgaagaagacaaagccttggccggccacattctgttcactgcccagcgcctggccgtggaacaaggctgtgaggaaggctttcgggtggtgatgaactgcaacccgaaaggcgggcaaaccgtttatcacatccatatgcatgtgctgggtcagcgccagatgaactggccgccgggctgattcccccccgaacaagggtcgcggcccctggctgcgacccaatgcccttgacgcaacgcaaacgcttgcccctctcttgcggtaaactggccgccgagattcttcccggaggtcagcatgactacccaacgtcactactcgccgattgaccgtctgttgctgcaagccgatatggccatgcgtacgctgctgcccttcagcggccaaccgtatcgcccttcgcctgccatcgtgcagcccgacgcgcagatgagcgagaccgagacccgccacgtcgccggcctgatgcgcatcaaccataccggcgaagtctgcgcccaggcgctgtaccagggccaggcgctgaccgccaagctgccgcaggttcgcgccgccatggaacatgccgccgaggaagaaatcgaccatttggcctggtgcgagcaacgcattcgccaactgggcagccaccccagcgtgttgaacccgctgttttacggtttatcgttcgggatcggcgctgcagccggcctgatcagcgacaaggtcagcctgggctttgtcgcagcaactgaacatcaggtgtgcaaacacttggacgagcatctggaacaactgccggccgaagatgaaaaatcccgggccattcttgaacagatgcgtatcgatgaagaacatcacgcagaaagcgcgctggatgccggtggttttcgctttccggcaccggtgcggtttggcatgagcctattggccaaggtcatgactaaaagcacgtaccgaatctgagcccaaaaaagggcgctatcacagcgccctttctttttgcccgtcgattgagcgatcaacccagttcgatgatttcgtaatcatgggtgatggccaccccggccgcgcccagcatgatcgatgccgagcagtacttctcggccgacagttcgatagcgcgcttcacctgcgcctctttcagcgcccgccccttcaccacgaaatgcatatggatcttggtgaataccttcggatcttcagtggcacgctcggcctccaggaaagcttcgcagctctccacagcctggcgtgacttcttcaggatgctgaccacgtcgaaattgctgcaaccgcctacgccaagcaggagcatttccatcgggcgaacgcccaggttgcggccaccggcttccggcgggccgtccatgaccaccacatgaccactgcccgactcaccgaggaacatggcttcgcccgcccattggatgcgtgccttcatcgcccagactccactgtaaaaaaagggtcgccagcttagcacagcgcctccgtgcctcagcgtttcgcacaaaagcgatcaatagcagggtttgcacggaaaattggttaatcgagtcagaatgtgtctgttaagctgacgccaaatcgatggcgtaatgccaccctttatacggcgtgtatcaatgccgataccgatgaatacaacaactccaactatttcgcgcagtcttttcgggatacaaccatggttgcccttactcccatacccaagatcaagaatctcgacaaactgctgatgcattgccagcgccgccgctacccggccaagcacaacatcatctgcgccggcgaacgttccgaaacgctgttcttcattatcaaaggttcggtcaccatcctgatcgaagatgaagacggtcgcgaaatgatcatcgcctacctgaacaccggggatttttttggggaactggggctgttcgaacaagccggcaaagagcaggaacgcagcgcatgggtgcgcgccaaggtcgagtgcgaagtggccgagatcagctacgccaagttccgcgaactggcccagcacgacccggacatcctttacgtcctcagcggccagattgcgcaacgcctgcgcgataccacgcgcaaagtcggcgacctggcattcttcgacgtcaccggtcgcgttgcccgctgcctgcttgacctgtgcaagcaacccgacgccatgacgcaccccgatggcatgcagatcaaggtcacgcgccaggaaatcgggcgcattgtcggctgttcacgggagatggtcgggcgcgtactcaaggacctggaagaacgcaacctggtgcacgtcaaaggcaagacgatggtggtattcggtacccgttaagccggcaggaagctggccaacatctgacggtacaacgtgtcgagccggctgatcgcatccggcgccgggaaggcttcgtgcagggcgatatggctctcggcacgcacccgctggtcgagaccgcaggcttgattgaagcggttgaccgccgcgatcagttcttcacgatcgttttccagcaacagtgcaccgtgcaccaggcccaccgggcgccccccgctttgacgccagcgctgggcagtgccaaccattttgcgaccattgagattgacgttgtagcgaccgtcgcaaaatgcgccgtcgatctcgccgacagacgctttgccacccaactcgatcagcaagtcgcagatcggttggcataaacgcaagtaaccggtttcgatacgattctggtcgccttcactgcgcggcggggcgtagaccagggcaatgttgaccgtggcgctcgactgcggcaccggctcaccgccggtttcacgcagcagcaccggccaaccggcgtcggcggagacttggctggcagtttcaaaggccggcaagcggctcaaccgacgtggcataaccaaagcctggttgctgggttgccagaacaacaacccatactcccgctcacctgcgcaaacagcagccagcaggtcctgctcggcggcaagtccggcttcgacggtcatcgcaaccggctgcgtcatcatcaatccagcgtcgaaccgctgaccgccacgccccgctccgggaagaacaggcgctgcaattcagcccccgggttctcggcacgcatgaacgtctcgcccaccaggaacgagtaaacgccgctgatctccatcaactcaacatcggcgcggttgacgatgccgctctcggtgatcaccaggcggtcacgcggaatgcgcggcagcaggtcgagggtgttttccaggctgacttcgaaggtgtgcaagttgcggttgttgacccccaccagcggtgtgtcgagggttttcagggcgcgttccagctcatcaccgtcgtgcacttccaccagcacgtcgaggccgacgcttttggcgacggcagccagctcggccatcttcacgtcatccagcgcggaaacgatcagcagcacgcagtcggcgcccagggcacgggcttcgacgatctggtacgggtcgaccatgaaatccttgcggatcaccggcaacttgcacgcggcgcgagcctgctgcaggaacaggtcggaaccctggaagtagtcgatatcggtcaacacggacaggcaagtcgccccccccttctcatagctgacggcgatttccgatggcacaaagtgttcgcggatcacgcctttgctcggcgaggctttcttgacctcggcgatcacggccggttgcttctgcttggcctgggcgatcaacgcattggcgaagccgcgcggtgcatcggcgatctttgcctgggcttccaactcggccaggctcacgcgggcacgccgctcggcgacttcttcagccttgcgggccaggatcttttccagaacggtcggcacactcatccttcattctccatcttgaatactgcggtgaatgctcccagctcttcgagcttctcacgagccagaccggtgtgcagcgcatcgtgggccaaagcaacaccttccttaagactataggcgtggtcggctgcataaagtgccgcgccagcattcaaaacaatcatctcggcggctttctgaccgttctcggtcttgcgacggcccagtgcatcacgaatcagttccagcgaagccgccgggctttccaccgccaggccgtgcaggctctgactcttcatgcccaagtcttccggttcgacccagtattcggtgacctggtcattcttcagttccgccacgaaggtcggcgctgccaggctgaattcgtccaggccatccttggagtgcaccaccagcacatgcttgctgcccaggcgttgcagcacttcggccagtgggcggcacaacgcctggctgaacacgcccaccacctggtgtttcacaccggccggattcgtaagcgggccgagcatgttgaacagggtacgcaggccgaggtccttgcgcgggccggcggcgtgcttcatcgcaccatgatgggattgggcaaacatgaagccaatgccgacgctgtcaatacagcgcgccacttgtaccggagtcaggttcaggtagatgcccgccgcttccagcaggtcggcactgccgctcttgccggagaccgcgcggttaccgtgtttggccacggtgcagcccgccgccgcgacgacaaaagaagacgccgtcgacacgttgaagatgttcgcaccgtcaccgccggtgccgaccacgtcgaccacaccgtcgagggtcttgagttcgaccttgtcagccaactcgcgcatcaccgacacggcgccgacgatctcgtcgatgctctcgctcttcatgcgcatggccatcatgaacgcgccgatctgcgcgtcggtgcattgaccggtcatgatctcgcgcatcacatcgctcatttcagcggtgctcaggtccaggtggccgacgatacggctcagggcagtcttgatatccatggaaagtccttagcgcgtgccgccgctctgcttgagaaaattggcgaacagctcgtagccctgctcggtcaggatcgattcggggtggaattgcaccccttcgatattcagtgtcttgtggcgcaggcccatgatctcgtcgaccgagccgtcctccagttgggtccaggcggtcagttccagacaatccggaagggtttcgcgcttgaccaccaacgaatggtagcgggtcacggtcaccggcaagttaagcccatggaacacgccctgatcatgatggaataccgggctggtcttgccgtgcatcacctgccgtgcacgcaccacgtcaccgccaaaggcctggccgatggactggtggcccaggcatacgcccaggatcggcagcttgccggcgaaatactggatcgcttccagggaaatacccgcctcggtcggcgtgcacgggcctggcgaaaccacgatgcgctccgggttcagggcagcgatctcggccacggtcaattcgtcgttgcgcaccaccttgacctctgcacccagctcgcccaggtactgcacaacgttgtaggtaaaggagtcgtagttatcaatcatcagcaacatgggggaaacctcaggaattgggggtctgttcagccagcgcaacggcgcggaacatcgcgcggcgcttgttcagggtttcttcccattcgagggccggcaccgagtcggcgacaatcccgccaccggcctgcacgtgcaactccccgtccttgatcacggccgtgcggatcgcaatggccgtgtccatgttgccgttccaggcgaaataacccacggcgccgccgtagacgccgcgcttgaccggctccagctcgtcgatgatttccatcgcgcggatcttcggcgcacccgacaaggtgcccgccggcagaatcgcgcgcaacgcatccatcgccgtcaggccagccttcagctcgccggtaacgttggagacgatatgcatcacgttggaataacgctcgatcaccatcttctcggtgagcttcaccgagccgatttccgagacccgcccggtgtcgttacgccccaggtcgatgagcatcaggtgctcggcgatttccttgtcgtcgctcaacaggtcttcttccagcgccaaatcggcttcttcggtcgcaccccgtgggcgcgtaccggcgatcgggcgcacggtgatcaggttgtcttcgacgcgcaccagcacttccggcgaactgcccaccacgtggaagtcaccaaagttgaagaagtacatgtacggcgtggggttgaagcagcgcaatgcgcgatagagatcgatcggcgcggccttgaagtcgatggacatgcgttgcgacggcaccacctgcatgcagtcaccggcaaggatgtattccttgatggtatcgaccgcacgttcgtagtcatcctgggtaaagctggagcggaacaccgggtcggccgccggcggacgactgaggtccaggccgcgacgcggagtgatcggctgacgcagtttttccagcagggcttcgaggctggcccggccttgctcgaacgcatcggcctgggacgggtcggccagcacgattgcgtgcatttttccggcgaggttgtcgaacaccaccaccgcgtcggagaccatcagcaggatgtccggcacgcccagcgggtccggattcgggcacttgcccaaacgtttttccacataacgcacgcagtcataaccgaagtaacccaccaggccgccgttgaagcgcggcaggcccgcgatggtcggcacgttgtagcgcgccttgaaggcttcgacgaacgccaacgggtcttcgacatcatggctttcgatctcgacgccatcatgggtaatgctcacatgatggtcatgtacccgcagcaccgtgcggcacggcaggccgatgatcgagtaacgcccccacttctcgccgccctgtaccgactcgagcaggtaggagttaggctcatcggccagtttcaggtagatcgatagcggcgtgtcgaagtcggccagggtttcgcaggccaggggaatgcggttgtagccggcagcggccaaacgcaggaattcttcgcgggtcatgatatgcctcgtggcttgagggtctaacagtcaggtatgcaaacgtgccgcagagcgcggccaggatcagtcaggcgcgccaacgccagcgggccagggccttgataactttcatccagagtttgcgagtgaccaccacgatggaatttccagaaggggacggatcggtatcgggcaacgttatctcagcgcccgctcccaagcaaccggggattaacaggcgcaggtcatcaatcaccaatgaaggcgactcttcggcgatcggccgaccatggttatagccgtagctgagggccacacactgcacgcctgcggccttcgccgcctgcacatcactgcgtgaatcgccgacaaacaacgactgcgaagccgggatattggccattttcatcacgaaaaacagcgccgccggatcgggctttttctgcggaagggtatcgccgccgatgatccagcggaaataccggccgattttcatctggtccagcagcggcgctacgaagcgttccggcttgttggtgatcagggccatttccacgccctgcttgctcagccatttgagggtgtcacgtacgccggggtaaaccacggtcagttcgtggccgtcttcataggcggcattgaacagttccagcgcatgctcggcctccacatcatcgacaccttcggcatcgatgttgttagccaaggcgcggcgcacaagcatgtgcacgccgttgccgacccactcacgcaccgactcgatcccggctggcttgcgccccagcttgagcagcatctcgtccaccgccgccgccaggtcgggcaccgagtcgatcaaggtaccgtccagatcgaacatcaccagccgtggcagtttgccggggaacagccgctcaaagccgctcatggacgcgccagcgccagttcggcacgcatcttgtcgatgacttcctggtagtccggcgcattgaagatcgccgagccggccacgaaggtgtcggcaccggccgctgcgatttcacggatattgttgacgttgactccgccgtcgatctccaggcggatatcacggccggaagcatcgatcagcgcgcgggcttcgcgcagcttgttcagggtgccggggatgaacttctgcccgccgaagcctgggttgacgctcatcagcaggatcatgtcgaccttgtccatcacgtactcaagcacgctcagcggcgtggccgggttgaacaccaggcccgccttgcagccgccttcgcggatcagttgcagggtgcggtcgacgtgcagcgaggcttccgggtggaaggtgatgtaggtcgcgccggcttccacgaagtcgccaatgatgcgatctaccgggctgaccatcaggtgcgcatcgatcggcgcggtgatgccgtacttgcgcagcgccgcacacaccatcgggccgatggtcaggttgggcacgtagtggttgtccatgacgtcgaagtgcacgaagtcggcaccggcggccaacaccttgtccacttcctcacccaggcgggcgaaatcggcggagagaatcgatggagcaataacgaagggctgcatgacgcaccttttttgagctaaatcacgatggcgcgcattgtatacctcatgctttgccgcgcgcaccgtgacctggctcaacggctagtaagccgcccggtagattttctcgatatcggcggcgctgagcttgcgcggattgttgcgcatcagccgctcaatgcctgccgcctcaaccgccatggccgggatcgcgtcctcgggcacgccgaaactgcgcaggcctgccgggatctcgacggcggcacacagtcgcgtcatcgcgtccacggcctggtcggccgcgtcgttgacgctcaagccgctgacattcacacccatggcctgggcgatatcctgcatgcgttcgacacaagccagtttgttccagtgcatcacatagggcagcagcagcgcattactcacgccgtgggcgatattgaaacgcccgccgagggggtacgccaacgcatgcaccgcaccgaccccggcgttaccgaacgccatgccggccatcaggctggcggtggccatgtcgtcacgggcctgcaggttggccgggttggcgtaggccttgggcagcgccttggcaatcagtttgatcgcgccgatggccagcgcatccgtgatcggcgaggcattcagtgacaggtaggattcgatggcatgcaccagcgcatccacgccactggcggcagtaacgctgcgcgggcaggtcagggtcatttgcgggctgatcagcgccacatccggcagcaggtagtcgctgacgatgccttttttaagctgtgcggccttgtcggagaggatcgccacattggtcacctccgaacccgtgccggccgtggtcgggatggcgatcaacggcgggcccttgcgcggcacctggtcgacgccaaagaggtccgccagcgcaccgtggtaaccggcgtaggcggcaacacttttggcgatatcgatggcgctgccaccgcccacgccgatcaggccgtcatgtccgccttcgcggtaagcgcgcatgcaatcttcgacgatggcgatttccgggtcgggcagtacgcggtcgaaaatctcgtaggcacgttcgcccaggtgttcgagggccagcgccacggtgccggatttgaccagcgcggcgtcggtgacgatcagcgggttgtccacatccaggcgggtgagctcaaaggccagttgttcgatggcgccagcgccggtgagcagtttgtgggcgatcttgaatgaggaagtactcatgtgcgcggcctcttattaagaaatgggctggcacaagagtagctcggaaacttgggttgcctagcattcagaggctgaatggtgatttccaacacgacacaaaaccatgtgggagggggcttgccccctcccacacttgaatctccagcaggccgttagactgccgcggtgcgcagtttctcgctacgcccgcgcaaccattccagagtcagcagcagcaacaccgagaaggcaatcaacaaggttgccgccgccgcaatcgtcgggctgaggttctcacggataccactgaacatctggcgcggcaaagtcgcttgctcagggccggcgaggaacagcgtcaccaccacttcatcgaacgacgtggcgaaggcaaacagcgcgccggagatcacccccggcgcgatcaacggcaaggtcacccggcggaatgccgtgagtggcgaagccccgagactggcggccgcccgcaccaggttgtggttgaacccctgcaacgtggccgacaccgtgatgatcacaaacggtacgcccagcaccgcatgcaccacgatcaacgagaagaagctgttgcccaggcccaacggtgcaaagaacaggtagctggccacaccgataatcaccaccggcaccaccatcggtgaaatcaccagcgccatcaccagcgccttgccggggaagttgccgcgtgtcaggccgatggccgccagggtgccgaacaccatcgccaacaccgtggccgccggggcaacgatgatgctgttcttcagcgcccgcatccactcggcggaggcaaagaagtcctgataccagtgcagtgaaaaaccctgcaacggatacaccaggaaactgccgctgttgaaggacaacgggatgatcaccagcaccggcaggatcaagaacaacaggatcaagccgcagaggatccgcaagctgtagaaccagacccgttcaacgggcgacatgtaagggctcagcatcgcaaggtctcctcagctcaggcgcaggcgactggcgcccaccagccggttgtagatcaggtacagcaccacggtggccagcagcagcaagccgcccagcgccgtcgccatgccccagttgatactggtgttggtgtagaacgccacgaagtagctgaccatctggtcgttcgggctgcccagcagggccggggtgatgtagtaaccaatcgccaggatgaacaccagcaggcaaccggcgcctacaccggcgtaggtctgcgggaagtacacgcgccagaagctggtgaatgggtggcaacccagggaaatagccgcacgcatgtaggtgggcgagatgcccttcatcacgctgtagatcggcaggatcatgaacggcaacagaatatgcaccatcgagatgtagaccccggtgcggttgaacaccagttccaagggtttatcgatcaggcccatgcccatcaaggcgctgttgatcaggccgccggactgcagcaacacgatccacgccgctacccgtaccaggatcgaggtccagaacggcagcagcacgaggatcatcagcaagttgctcttgcgcgccggcaggttggccagcaggtacgccaagggataggccagcagcaggcagatggccgtaatcaccaggcccatccagaaggtacgggcgaagatgtccaggtagatcgcctggtccggcgtggccggggcgacttcgccaaggtcgtcgatgcgatggtcgacggccgccagcaggtagaacggcgtcagactgctggtgttgcgccggatcgcctgccagtacgccgggtcgccccagcgttcatcgaggttttccaacgcttctttataagagccgggcgcttcactgaacggcagcgcccgcgcggttttggtcagcaggctgcggtagccggccagttccatgttcaagcgcttggacagatcgcccagggtctggttcttgcgcgcctcgcccagatcctcgctgagggcctggtacaccggttcacccggcaagccacggccgtcccaggccgtcaccgcgaccacggtacgcggcaagccacccaccacttccgggttgccgacgctcttgaacagcaacgcaatgatcggcaccaggaacaccagcagcaagaacagcaccagcggcgcaatcaaggcctgggccttccagcgattgagccgctcggcacgcgccaggcgctgcttgagggtggggctgttgacctcgttcgagggaacggcgatggccatggctgactccgaatcttaaagataaatacagatcccctgtgggagggggcttgcccccgatggcggtgtatcagttgataggtaggctgactgacactccgctatcgggggcaagccccctcccacatgggttacttggccgcccaggcgttgaagcgctgctccagctgctcgccgttatctgcccagaagctcacatcgatctgcacctggttggcgatgttttccggggtggtcggcatgtccttgagaatgtccttggccagcaacggcacggcttgggtgttggccgggccgtaggcgatgttttccgagtaggtcttctgttgctgaggctgtaccgagaaggcgatgaatttcttcgccgcttcggcacggtccttggccaggccttttgggatggcccaggcgtcgaagtcgtagatgccgccgttccacaccactttgaggttgctttctttctgcacggcggcgatgcggccgttgtaggccgagctcatcacgacgtcaccggaagcgaggtactgcggcggctgtgcgccggcttcccaccactggatcgacggcttgagttcatcgagtttcttgaatgcacggtcctggccatctttgccggccaacactttgtacacgtctttcggcgcaacgccgtcggccatcaaggcgaattccagggtgtacttggcacctttacgcaggccgcgtttgcctgggaatttcttggtatcccagaaatccgcccaactggtgggcgcagaagtaagtttgtcggcgttgtaggccagcacggtcgaccacacgaagaagcccacgccgcaaggctggatcgcgcctttcacgtagtcagcggtgctgccgaacagtttcgggtccagcggctcgaacatgtcttcgtcgcagccacgggacagttccggcgattccacttccaccaggtcccaggacacgctcttggtgtcgaccatggctttcaccttggccatttcaccgttgtactcgccggcgacgatcttgccattgcccgctctttcccacggcgcgtagaacgccttgacctgggccgccttgttcgcgccaccgaaggacacgaccgtcaggtccgggccggccatggcctgggttgcgccgatcaagccaatggccagcgccgaatacttaagggatctcaacattgttgttctctccacgtgcagggttggtgaagccagggggcgatcaattcgcctctagaagtgggtcgagtgcgcgaacgtgctcgacttgccagccaatcggtaccacgtcgccgaccgccagggctgggtccagctcggcaatcggttgtttcacaaaaaaatcggtcttgccgcagacttccaggcgcacgcgcacgtggtcgcccaggtagatgaattccgccacccgccccgagaaacggttgacgcagctttcgctggaaccattgaggctgacgcgctccgggcgcaccgagagggtcaccgggccgccgacctggccgacgttcaccgccagcgcctcgaccttctcgccccgcgccagctccaccacgcagcgctcgccggtgtggctgtgcaggcgaccattgaggcggttgttctcaccgatgaagttggcgacgaaggtgttcttcggttcttcgtacaaggtgcgcggcgcggcgatctgttggatctcgccctggtggaacaccgccacgcggtcggacatggtcagcgcttcgccctggtcatgggtcacgtacaccacagtcacgccgaggcgctggtgcaggtgcttgatctccatctgcatgtgttcgcgcagttgcttgtcgagggcgccgaggggttcgtccatcagcaccaattgcggttcgaacaccagcgcgcgggccagggccacgcgctgctgctggccgccagagagttgcgccgggtagcgctgggcgaaggcatcgagctggaccatgctcaacacgcgtttgacccgctcgctgatgtcggtcttgctcaagccccgcaccgacagcgggaacgccaggttctcggcgacggtcatgtgcgggaacaaggcgtagttctggaacaccatgccgatgtcacgcttgtgcggcggcacgttgttgatggaccgcccggccagctggatttcccctgcggtcggcgtctcgaagccggcgagcatcatcaggctggtggtcttgcccgaaccggaaggcccgagcagggtgaggaactcgcccttgcgaatctccaggttgaggtctttgacgatcaggttctcgccgtcgtagctcttctgcacgccacgaaagctgaccagcacatcatttgaatccacctcgctcatacccgcacctttttgttttggactgctgtggaacaagcgtagtccaggcgcgagaccccggaaatcgggggccaggagagaattgcatcagccggatggaaggttgggggtagggattgccctacagggatggcgcgcacggaacggtgccgcgccaaggggtgagcggcaagcggcaagaatgggctccgcgggtttttcgcggtgtcgttatcaggtatgtggttagagcagcttgtgttccatggcgtacttcaccaactcggccagcgaggtgatattgagcttttgcatcaagcgcgccttgtgggtgctgatggtcttgctgctcagcgccagctgctgggcgatgtcgttgacgttggcgccctgggccaagcgctcgaacaccgagaactcacgctccgagagcaatgaatgcagcggtcgcgtatcggtcaggccgacctcgaagaccatgcggtcggccaggtccgggtcgatatagcgcccgccagccgccaccttgcggatcgccgtaagcaacagcgccgggtcactgtccttggtggcgtacccggcggcgccaaccttcaaggcgcgggcggccatttgcgcttcgtcgtgcatcgacaacaccaggatggccggcggattgttcagcgcacggatgcgcgcaatcgcttccaggccattgacgccgggcatcgagatgtccagcaacaccacctcgcaaggcacgtgacgcaaggtctccagcaactgctcgccattgccggcctcacccaccaccagcaggtccttggccaggccgatcaactgcttgatgccttcacgaacaatggtgtggtcttcggctaccagtacacggatcacagggctttcctctgggtgttatgcatccaacggcaccgtgacgctcagggtggtgccctcccccaactcgctgtccaggcttaattgcccgcccatgatcagcacccgctcgcgcatgcctaccaggccgaacgataccggacggccctgggcctggacgaaaccgacgccgtcatcactgatggtcagccgcagatgcgtgccttccactgccaaggtcagttcgacagtatgcgcctgggcatggcgcatcacattggtcagcgcctcctgcaggatacggaacaggccgatggccttggcatcgctaagggtcggaagattatccggcacctggaccaggcaggggatttgcgtgcgcgcttcaaaacgtcgcgcctgccattcgatggccgaggcaatgccggcatccaggatcggcgggcgcagcgccgtcgccacatcgcgtaccaattgaaataactgggcgatcaggcgcttcatgctgttcaagcgctcgtgcaaaccggggtcgagttgcgcataggccagctcgcacatcgaggtttcgagcttgagcactgtgagcatctgcccgagttcgtcgtgcacttcacgggcgatacgggccttttcttcttcgcgcacggtttccaggtgcgcggagagttcgcgcagttgcgcttcactttgcagcaacgcggccaacgtccggcgcaactcggtgacgtcgttgaggtagaccaccaggtattcggcttcggcaaaccgcagaaaactcaaggacacgttggtcggcaggatgctgccatcggcacgccggcaatcggtggcaaagttctgcgggccgtcttcgctggcccgcgcgcgtttccacaggttgagccagcggtccatgtccaggctcggatccaggtcagccaagggccgctcgatcagtgcaccggggccgtagcccagcatgctttcagcggcacgattggcgtagcgcacatgactgtcccagttgacccacaagatgcccacggtgctctgatcaatggaaaactgcgtcagccgcaaggcttcggccccggcggcgcgggcggcgctttcttcgcgggcggccagcagatcatgttcgagcacccgttgctggcggcgctgccagaacacgacagccaggctggcaagcaaaaacaggcccagcaacaggctgaggttttgccacaggcccggggtttccgtcaggcgtgggtacttgggttgcagccagcggctatgcaattggtccaggtcgcgggcggggatagcgcgcaaagcgctttccatgatgccggccagctccggccattcccggcgcgtggccacccgcagcaactgtggcaggccgatatcccccaccaccgccagcccggcgaattccgcctcgccggacaagcgactcaattgcgcctcatccaccaccgcgtagcgcgcctgctggctcaccagtaactgcaaggcctggcgctccatcggcacaccttgcaggttgaggccggggtaggtactgcgcaggtagtccgccacggcgctgggcatgcgcacggcaacgcgggattgctcatcgagtttctccaactccaccgcaccaccgccctcgcggataccgacaatgtgctgcggcacacgcatataagggtcggtgaacaaccataggcgtaaaccggccggggtttgttgcaggccgggggcgatgtccacttcgccctcgcgcacggcggcttccagttgctcctggttggggaagttgcgccaggtcagctcgatgttcagtgccttggccaaccactgcatcaactccacgttcgccccggacagccgttgcaaacgccggtcgtattgcgcgtagggcgcctgcaacaccaggcccacccgcagctcggggtgctgggccagccactcgcgttgctgcgcattgagctgcgcctggggcgtggcgggcacagtggcggcattggccatcaaggcaaggcaccaacagccgataaccagcagacagcgaaaacccatgattgacgtctcacatcactgacaaatactgaccaacccattaggctgccggaatcacttctggccgggaatttacgatgccctttgttcaccgttcggcactgccagcattgtgcctgtcgttacttattaccagtgccttttccgtacaggccgctgacgcccccgcacctgccgccgaaaaaccggtcgaacgccagcctttgctcgagcgtagccaggaggaggccagcgccctggagcgcaaaataccgcaacaggaacagcaacaattgcaggccggcagcgattcattcctcgccctgtggaaaccggccaacagcgccgagcccgagggtgtggtgattatcgtaccgggcgccggcgaaagtgctgactggccgcaagcaatcagcccgttgcggcacaaattgccggatgccgattggggcaccctcagcctgtcgctgccggatgtgagcgcggacaccctgccaccgcgcgtgatggaagcgcccaaggctactgtcgacaccagcagcaaagaggcaagtaccgccgacaaacctatcgaacaagccgccagcgccgaagccgaaggcaccgacccggccgtggtacctggggccgatgaacaggacaagaccgacgcttcgcgcatcttcgcgcgcatcgacgcggccgtggccttcgcccagacccagagcgcacgcagcgtggtgctgctcggccatggcaccggcgcctggtgggctgctcgctatttgagcgagaaacaaccgtcccaggtgcagaagttcgtcatggttgcggcgcagacgcccaccgggcgccatccggatgtgcaacaactggcccccggcctgaagttgccgaccgccgatgtcttctatcaagacagcgctcaatcacgcaaaaacgccgtggcccgcgcccaggcggccaagcgtttgaagaatgacggttacaagcaggtgtcgttgaaagccttgcccggcaacagtgatgccgggcaggagcagttgtatcgcagggttcgcggctggttgagcccgcaggccagcgtcgactgaaacctagcggaaatctcggcgctcgcgaatcaacgtataggcgttgtgcaattcacgggtacgctcggtcgcctcacgcacctgcgcggggctggcacccgtgccagcaatcttgtccgggtgatggcgactgagcagcctgcgataagcctgcttgattcccgatggctcggtggtggccgtcactcccagcaagcgcaacgcctcctgataagtgacgccgcgactgaccaatggccggtgctcaggcttgaagtcagcggccaatgcctggagctgttgtggcgtccagcccagccatttgccccacaggtcgatcaggtcgcgctcggcgtcatccgccttgccatcggcccacgccatacgccagcacgcgcgcaagacaccttcggcggcatggggctgcgccttgagcacacgcaagtagctgcgcacccggtcagcgccggacttgccgcgattgaacgccgcaatcgcacggcgctgggccgactcggtcatgtccagcgcacgcatctcctggcgcgcctgttggatatgcccatccaccacgcgtccattgctcttggccagacgccccagcaacacaaacaacaactcgtcgttgcgcaacgctgggcgcccacccaggcgctcgcgcaattgcgcccagctgtgcagttgcaggcggcggtccagcgcctgccccaacagtgcacccaacatggcccccggaatactggcaatggcaaagccagcccccgcgccgatcagcgtccctggccacagcatgctactgccccgctgtcagcagggtttcgacctgcgccaggcgctccagcgtgccgacatcaatccagcgtcccgccatgtgttcccccgttaccagacctttggccatggcggtccgcaacagcggcgccagcttgaaggcacccgcgctgcacccctcgaacagcttggggtcgagcacggaaatgccactgaaggtcaggttatcggcaccggccgccgcatcatgaagcaaaccctgatccaggtagaaatcgccacccgaggggtgatgcgccgggttatcgaccatcaccagatgggccaggcccttgagcggttgcttgagccgggtgaagtcgtaatcggtccagatgtcgccattgaccaccaggaaaggttcgtcccccagcaatggcagcgcctggaaaatcccaccgccggtttccaacggttcgccttcggcggagtaacggatgcgcacgccaaactgcgcaccatcccccaggtaactctcgatctgttggccgagccaggcatggttgatcacgatatccgtgaagccggccttggccagcgcctccaggtgatactcgatcaggcgtttgccgccggcctgcaccagcggcttgggcgtatgcaaggtgagcggacgcatccgctcgcctttgccggccgccaggatcatcgccctcatacgcttgcctcggcgggctggcgcaggctggcgagcaattcacccagttcgctcagctccgggcggtcggccagcaccgcttctatataggcaaagaagcgcggcacatcggccaggtaacgtggcttgccgtcgcgatggcagatgcgcgcgaagatgccgataaccttaaggtggcgctgcacacccatcaggtcgctggcgcgcaggaagtcttcgaagtccgcctgcaccgggatgcccagtttcgcggcacgctcccaatagccgcgctgccagtcccgcacgcgggccttgggccaactgaggaacgcgtccttgaacaggcaggtgatgtcataggtgaccggcccgtagaccgcatcctggaaatccagcacgccggggttcggctcgctgatcatcaggttgcgcggcatgtagtcgcggtgcaccagcactttcggctgcgccagggcgctgtcgatcaggtggtcactgacgcgctgccaaagcgcctgttgctgtgtatccaactcgatacccagatgccggcgtacgtaccactcgggaaacaattccagctcgcggcgcagcagggcgacgtcataactgggcagcggcgcatccatcggcagctgctggaaagccagcaaggcgtcgatggcatcggcaaacaagtgatcggcatttttgtcgtcaatcacgtccaggtaggtcttttggcccaggtcattgagcaaaagaaagcctcgcggcaaatcttctgcataaatttttggaacatttatgcccgacttcgccagcaaatgagcgatatcgacgaaaggtttgcagttttcctgggggggtggagcgtccattacgacaaaggtccggccccccccttcccagcggaagtagcgcctgaaactcgcgtcgctgctggccgcggtcaatgtggccggggggacggcgccccagccttgagtgttgaaaaggatcggcaactgctcatccagccaggcttccagctgttgtaaacgtagatcttgctcgggcattacaagggtctccgacggcgctagccgtcaagcggggcatgctttattatcacgcatctttttcagaccatcgagaggcgtgcggcccaaaccgcgggcagatggcacgcaggaagcccggactaataagatggcattgaaatcccccgcgtttcgtagaaaatttccgttgctggtaaccggcagtctgctggccctgcaacccttcgccacctcattcgtggtcgccgcggaacagtatgactgctcagtctctgcttcgggtgcctgggattgcgcgccaaaaaccgccgcagccccactaccaccacgcccggtgcatgacggtgcagccgtcagctccgccaacagcacggcgcaggccgatgctggcggcaacgccgaggccgagcccaagaccgctctggtcaccgaagccaagggccgtggcctgcgttcgcgcagcgccgactacagccacctggactgggtgccacgcgacaagctgaccgcagcacagttggctgaaaccggcccttactgcggcggtgcgtacattgagccgactcgccctggcatgaacgacaagacgaacaagagcgatgcgcccaccttcatcggtgccaaggcctctcgttacgagcaggaacaacaggttgcaaccctggccggtgacgtcgtcatgcgccagggcagcatgcagctggaatccgaggaagccagcctgtaccaggccgagaaccgtggcgagctgaacggcaaggtccgtctgcgcgacaacggtgcactgatcgtgggcgaccatgccgaagtgcaactcgacaccggcgcggcgcagatcgataacgccgaatacgtgctgcacaagtcgcgtatccgcggcagcgcgctgtacgccaagcgtgccgagaacgcgatcatccgtctcaaggacggcacatacaccacctgtgagccggacagcaacgcctggcagctcaagggcaacaacatcacgttgaacccggccaccggtttcggtacggccaccaacgcgacgttgcggatcaagaacattccgatcctgtacaccccctacatctatttcccgatcgacgaccgtcgtcaatccggcttcctgccgccgagcttcagcaccggcagcgaaaccggcttcaccctggtcacgccgtactacttcaacctggcgcccaactacgacgccacgttgtacccgcaatacatgaccaagcgcggcttgttgatggaaggcgaattccgctacctcaccaaatccagcgaaggccagttcggcggcgcgtacctgaacgatgacaacaacgagcgcagcaagcagaccgattacgaaaaaacccgctacatgctcaactggcagcacaagggcgggctggattcgcgcgtactgacccaggtcgactacacacggatcagcgatccttactacttccaggatctgaaatcgttccaggaaggcgttgaaagccgggatgctctcaaccagcagggttccgtgacctaccggggcgactcttaccaggcgcgcctgaacgtccaggcctaccagctggcgacgatctcccagatcacgccgtatgaccggttgccgcaaatcaccttcaatggtgccttgccgtaccatccgggcgggctgaacttcacctatgagactgaagctgttcgctttgaacgcagccttgaaaaaggcacgtttaccgatcagaacgggcttgtgtcgcctcgcctggacacctatgtcaccggcctgacccgcgccaacggcacacgcttgaacgttgcgccagccgtcgaatacccgatgaactggacctacggttttgtcacgccgaagctcaagtacgtctacaccaagtacgatcttgacctcgacagcatcggcaagaaccagatcatcgcccagcaagcggcggccactgcggccaacccgtacgccggtggcaacttcaagagctcgcaagaccgcgcggtaccaatcgccagcgtcgacagcggcctgtatttcgaccgcaacaccaactggttcggcaaagactatcgccagacccttgagccgcgtgcgttctacctgtacgtaccgaacaaggaccaggctgacatcccggtcttcgacaccagcgagtactcgttcagctacgcctcgctgttccgtgacaaccgcttcagcggctccgaccggatcggcgacgagaacaaactgtccctgggcttgaccagccgctggatcgaagacaatggcttcgagcgtcaacgcgtgtccgtgggccaggcggtttacttcaaggatcgtgaagtgcaactgccaggtatcctggccgccgaccgtgccgacgcacgttccgatgtttcgccaatcgccctggactacgagttccgcttcaaccgtgactggcgcgccactgccgactacaactgggacaccgaggagcacagccctcgttccggtagcgcaatgctgcactaccagccggaagacaacccgaacaagatcatcaacgtcggttatcgctatcgcaacgaccaggtcgtctacaaccagctgaccggcaaatggcagttcggtggtgactacgggcagccaggtgatccgaacttcgtgaaggattactacaagatccagcaacacgacttctcgatgatgtggccgatcattccacaatggaacctgatcacccgctggcagtatgactacgcccgcaaccgtaccctggaagccttcggtggtttcgagtacgacaactgctgctggaaactgcgcgtcatcaaccgttactgggtttccaacgacgaatacagccagatcgccccgcttaacgaaaagggtgaccacgggctcttcttccagatcgtcctcaaaggactcggcggcctgaccggcgccaaggtagagagcttcctcgacaaaggcattgaaggttatcgtgaacgtgaagaccaagctttctgattgtctgcgcccgctagtgctgggcgcgctgttcctgggtaccgcttcggcgcacgctgcagttcagcaactggataaggtcgtggccatcgtcgataacgatgtgatcatgcagagccaactggaccagcgcgtcaaggaagtccagcaaaccatcgccaagcgtggcggtggcgtgccaccgacgagtgtcctggaccagcaggtgctggaacgcctgatcgtcgagaacctgcaactgcagatcggtgatcgttccggcatccgtatttcggacgaagaactgaaccaggccgttggcaccattgcccagcgcaacaacatgagtatcgatcaattccgcgcggccctggcccacgatggtctttcgtatgaagatgcccgtgaccagatccgccgcgaaatgatcatcagccgtgtgcgtcagcgccgtgttgccgagcgggtccaggtgtccgaacaggaagtgaagaacttcctggcctcggaccttggcaagatgcagctctccgaagaactgcacctggccaacatcctgatcccgactccggacagcgccaactccgagcagctcaatgccgccgccgccaagacccaggctatctatgatcgcttgaaggcgggtgccgattttgcccaaatggcgatcgcccaatctggcagcgacaacgcactggaaggtggcgacatgggctggcgtaaagccgctcaactgcctcctccgttcgaccgtgaactgagtgcaatggaagtgggtggcatcacccaacctgcgcgcacaccgggtggtttcatcatcctgaagctcctggaaaaacgcggcggcgaaacttcactcaaggatgaggtgcacgttcgtcacatcctggtcaaaccaagcgaaatccgcaccgaagcgcaaaccaaggaattggcccagaagatctacgaccgcatcgaaagcggtgaagacttcgccaccctggccaagagtttctcggaagacccgggttccgccctcaacggtggcgacctgaactggatcgacccgaaagccctggtgccagagttccaggacgtcatggccaagaccccgcaaggcgtgctgtccaaaccgttcaagactcaatatggctggcatgtgctggaagtccttggccgtcgcgccaccgacaacaccactcaagcccgcgagcaacaagcgctgaacgtactgcgtaaccgcaaatacgacgaagagctgcaaacctggctgcgtcagatccgcgacgaagcctacgtggaaaacaagctgccaggcgccagtcaaacaggcaccgaccaggcagcgcagtgaaaccccagcgttttgcggtgacacccggcgagccggccggcattggtcctgacctgtgcctgctgctcgcctcgcaaccccagccataccccctgatcgccattaccagccgtgacctgctccttgagcgggccgcgcagctgggtgtggctgtcactttgctggacgtggcgccgggcaactggcccgatctgcccgcccccgcaggcagcctgtatgtgtgggaaaccccactgcaagccaaggtgattgccgggcaactggacaaggccaacgcagcgttcgtgctcgaaaccctgacccgcgccgggcaaggctgcatcgacggcgacttcgctggcatgatcaccgccccggtgcacaagggtgtgatcaacgaatccggcatcgctttttccggccataccgaattccttgccgaactgacccacaccgagcaggtagtgatgatgttggccacgcacggcctgcgggtcgccctggtgaccacgcacctgccgctgcgcgacattgccgacgccatcaccgtcgagcgactggagcgcgtgacgcgcatcctgcacgccgacctgcaacagaaattcggcattgcccagccgcgcatcctggtctgtgggctcaacccccacgccggtgaaggcggccacttgggccacgaagaaatcgacatcatcgaacccaccctggagcgtctgcgccaagaaggcatggacctgcgcggcccactgcctgcggacactctgtttacccccaaatatctggagcactgcgatgcagtgctggcgatgtaccacgaccaggggctgccggtgcttaaatacaaaggcttcggcgccgccgtcaacgtgacactgggcctgccgatcatccgcacctccgtcgaccatggcaccgccctggacctggcgggcagcggcaagatcgataccggcagcctgcacgtggccctggaaaccgcctatcagatggccgagacccgtatatgactgagcattaccaacaccgggcgcgcaagcgcttcgggcaaaacttcctgcacgacgctggcgtgatcgatcgcatcctgcgctccatccatgccaagcccgaagaccgtctgctggaaatcggcccgggccaaggcgcgctgacccaaggcctgctggccagcggtggccaactggacgtggtggaactggacaaggacctgatcccgatcctcaaccagcagttcgccggcaagcccaacttcaacctgcatcagggcgatgcgctgaagttcgacttcaacaccctcaacgccgcgcccaacagcctgcgcgtggtgggtaacctgccgtacaacatctccacgccgctgattttccacctgctgaacaacgccgggatcatccgcgacatgcacttcatgctgcaaaaggaagtggtcgagcgcctggcggcaggccctggtggtggtgattggggccgcctgtcgatcatggttcagtaccactgccgtgtcgaacacctgttcaacgtcggtccgggtgcgttcaacccaccgccgaaggtcgattcggcgattgtgcgcctggtgccccacgcggtactgccgcacccggccaaggaccatcgcctgctggaacgcgtcgtacgcgaagcgttcaaccagcgccgcaagaccctgcgcaacacgctcaaggccttgctgagcaacgccgagatcgaagctgccggcgtcgatggcagcctgcgtcccgagcaactggacctggccgcgttcgtgcgcctggcggaccagttggctatccagcctgcgcccgcagcggaatagagcctcccggggataggccagacagcatgtctggcctagtgcccacctcttggcctagactgacccgcatctgctgtcctccgcttttaaggcctcttgcatgtccgatcctcgctaccagatcgacgtcagcgtcgtcacccgcttcctggcggaccaatcgcaacctgaacagaaccgcttcgcctttgcctacaccatcacggtgaaaaacaacgggctggtaccggccaagttgctgtcacgccactgggtgatcaccgacggtgacggccaggtcgaagaagtgcgcggcgcaggcgtggtcggccagcagccgctgatcgacagcggcgccagccacacctacagcagcggcacggtgatgacctccaaggtcggcaccatgcaaggctcgtatcaaatgaaggccaccgacggccaactgttcgacgccatcatcgcgccgttccgtcttgccgtgccgggagccctgcactgatgacgacgtatgcggtcggtgacctgcaaggttgcctggagccgctcaagtgcctgcttgagcgcgtagccttcgatccggcaagtgaccgcctgtggttggtcggcgacctggtcaaccgcggcccgcagtccctggagacgctgcgctacttatatagcctgcgcgattccctggtgtgcgtactgggcaaccacgacctgcacctgctggcggcgtgcaacaacatcgagcgcctgaaaaagggcgataccctgcgggaaatcctcgaagcacccgatcgtgccgaattgctcgactggctgcgccgccagaaaatcatgcattacgacgaaggccgtaacgtggccctggtccatgcgggcatcccgccccaatggtcattgaaaaaagccctcaagtgcgccgccgaagtcgagagcgccctggccgatgacaacctgtacaccgcctacctcgacggcatgtacggcaacgagccggtcaagtgggacaacgacctgaccggcgtcacacgcctgcgggtcatcaccaactacttcacgcgcatgcgcttctgcaccgtcgagggcaagctggacctcaagagcaaggaaggcgccgacaccgcgcttcccggctataagccttggttcgcccacaaagaacgcaagacccgtgacaccaagatcattttcggtcactgggctgcacttgaaggcaagtgcgatgagcctggcgtattcgccctcgacaccggttgcgtgtggggcggcgccatgaccctgatgaacatcgacaccggcgagcgttttagctgccagtgcgaatcccccctgcccgttacactgccggctgccgccaggccctaggagccatccatgagcgaattcaaacgtatccctcccgaacaagcccaggccctgcgcgagcaaggtgccgtggtggtcgatatccgcgaccagccgacctacaacgccgcacacatcaccggtgccaagcacctggacaacgtcaacatcgccgacttcatccgcgccgccgaccttgacgcaccggtaatcgtggcctgctaccacggcaactccagccagagcgcggcggcctacctgatcagccagggcttctccgacgtctacagcctggacggcggctttgagctatggcgtacgacctatcctgcagaaatttcctcaggcgattcgcaataatttttttcacaccccgctaccccgcgtgacgcttgggcttgcgccgtttctgacgaacggcgcagccaaactaattgcgcatcgcgccttgacctctgcgattccgaactatccttaagcgcaggccatccgaatcaggggagagccggtacaccggcgtgcgggtcatcggtagcgtttcagggtgttctggggggaaaacagccattggcgttcgtcaatgtctgccagcatcgactgattgatccggcgtcggctccacgtatcgagcgaggtgacgacgtcatgagtattttcagccacttccaacaacgcttcgcgtccacacagcaggaagaactcacgctgcaagagtatcttgaactgtgcaaacaggaccgcagcacctacgcgtctgccgccgaacgtctgctactggcgattggcgagccgcagttgatcgacacctcgaataattcgcggctgtcgcgaatattctccaacaaggtgatccgtcgctacccggcctttgaagacttccatggcatggaagaatgcatcgaccagatcgtctcctacttccgccatgccgcccaaggcctggaagagaagaaacagatcctctacctgctcggccccgtcggtggcggtaaatcgtccctggccgaaaagctcaaacaactgatcgaaaaggtgcctttctacgccatcaagggttcgccggtgttcgagtcgcccctgggcctgttcaacgccacggaagatggcgcgatcctcgaagaggacttcggcatcccacgccgctacctcaacaccatcatgtcgccctgggccaccaagcgcctggcggagttcggcggtgacatcagccagttccgcgtggtcaagctctacccctccatcctcaaccagatcggcgtggccaagaccgaaccgggcgatgagaacaaccaggacatctcggcgctggtgggcaaggtcgatatccgcaagctcgaggaatacccgcagaacgacgccgacgcctacagctactcgggcgcactatgccgggccaaccagggcctgatggagttcgtggagatgttcaaggcacccatcaaggtgctgcacccactgctgaccgccacccaggaaggcaactacaacagtaccgaaggcctcggtgcgattccgtttaccgggatcctgctggcccactccaacgaatcggagtggcacaccttccgcaacaacaagaacaacgaagccttcatcgaccggatctatatcgtcaaggtgccgtactgcctgcgggtcagcgatgaaatcaagatctacgacaagctgctgttcaacagctccctggccaaggcgcattgcgcacctgacaccctgaagatgcttgcccagttcaccgtgctgtcgcgcctcaaggagccggaaaactcgaacatctactcgaagatgcgcgtgtacgacggcgaaaacctcaaggacaccgaccccaaggccaagtcgatccaggaataccgcgacaccgccggtgtggatgagggcatgaacgggctctcgacgcgttttgcgttcaagatcctgtccaaggtcttcaacttcgacccccacgaaattgctgccaacccggtgcacttgctctatgtgctggaacagcagatcgaacaggagcaattccaggcggaaacccgcgaacgctacctgcgtttcctcaaggaatacctggcaccgcgctacatcgagttcatcggcaaggaaattcagactgcgtacctggagtcctacagcgagtacggccagaacatcttcgaccgctacgtgctgtacgccgacttctggatccaggaccaggaataccgcgacccggaaaccggcgagatcctcaaccgcgtggccctcaacgaggaactggaaaagatcgaaaaacccgccggcatcagcaatccgaaggatttccgcaacgaaatcgtcaacttcgtgctgcgcgcccgggccaacaacaacggcaagaacccgacctggctcagctacgagaaactgcgggtggtcatcgagaagaaaatgttctccaacaccgaggacctgctgccggtcatcagcttcaacgccaaggccagcaaggaggaccagcaaaaacacaacgacttcgtcacacggatggtcgagcgcggctacaccgacaaacaggtacggctgctatccgagtggtacctgcgggtgcgcaaatcgcagtaaggcagcgacaggcgtgcgctgccgggcttctggcctggcagccgaccgcttgtctctaagcttccagctcgcggcttgaagcttgtaacgtgaagctgcccggagggctccccatgagctatgtgatcgaccgacgcctcaatggcaagaacaagagcacggtaaaccgccagcgtttcctgcggcgttaccgtgaccacatcaaaaaggccgtcgaagaggccgtcagtcgccgctccatcacggacatggagcatggcgaacaaatcagcattcccggacgggacatcgatgaaccggtgctgcaccacggccggggcggtaagcagaccgtcgtgcaccccggcaacaaagagttcaccaccggcgaacatatccagcgtccccaaggcggtggcggcggcaaaggcccaggcaaggcgggcaactccggcgaaggcatggacgagttcgtgttccagatcacccaggaagagttccttgagttcatgttcgaggacctggaactgcctaacctggtcaagcgcaacctgaccggcaccgacaccttcaagaccgtacgtgccgggatcagcaacgagggcaacccctcgcgcatcaacatcatccgtaccctgcgctcggcccatgcccggcgtatcgccctgtcgggcagcagccgcgccaaactgaaggaagccaaggaagagttggcgcgcttgaagcgtgaagaaccggacaacttcggcgatatccagcaaattgaggcagaaatcgagaaactcagcgcgcgtattcaccgcgtgccatttctggacactttcgacctgaagtacaacctgttggtcaaacaacccaaccccagctccaaggccgtgatgttctgcctgatggacgtgtccggctccatgacccaggccaccaaggacatcgccaagcgcttcttcatcctgctgtacctgttcctcaagcggaactacgacaagatcgacgtggtattcatccgccatcacaccagcgcccgggaagtcgacgaagaagagttcttttattcgcgggaaaccggcggcaccatcgtctccagcgccttgaagttgatgcaggagatcatggccgaacgctacccggccaatgaatggaacatctacgcggcgcaagcctcggacggcgataactggaacgacgactcgcccatctgccgcgacatcctgatcaaccagatcatgccgttcgtgcagtactacacttacgttgaaatcaccccccgtgagcatcaggcgctgtggttcgaatacgagcgcatcggcgaagcctttgccgacacgttcgcccagcagcaactggtctcggccggcgatatctacccggtcttccgtgaactcttccagcgcaggttagtgacatgaccgccaaaaaagagcataagcgccaacccatctccacggggtctgagtggacctttgaactgatccaggcctatgaccgggaaatcagccgcatcgcggcgggttatgccctggacacctaccccaaccagatcgaagtgatcaccgccgagcagatgatggatgcctacgcctcggtgggcatgcccctgggctatcaccattggtcctacggcaagcatttcctcagcaccgaaaagtcctacacccgcggccaaatgggcctggcctacgagatcgtgatcaactccgacccgtgcatcgcctacctgatggaagaaaacaccatctgcatgcaggcgctggtggtggcccatgcctgctacgggcataacagcttcttcaagggcaactacctgttccgcacctggaccgacgccagttcgatcatcgattacctggtgtttgccaagcagtacatcatgcagtgcgaggaacgccacggcatcgatgcggtagaggacctgctcgactcctgccacgcgctgatgaactacggcgtcgaccgctacaaacgcccgtacccgatttccgccgaggaagaacgcctgcgccagaaagagcgcgaggagcatctgcagaagcagatcaatgacctgtggcgcaccattcctaaaaagacaggaaaaaacagcgacaaggacaatgcacgcttccccgccgaaccgcaggaaaacatcctgtacttcctggaaaaacacgcgccattgctggagccatggcagcgcgaaatcgtgcgtatcgtgcgcaagatcgcccagtacttttatccacagcgccagacccaggtgatgaacgaaggctgggccacgttctggcactacaccctgatgaatgacctgtacgacgaaggcctggtgaccgacggtttcatgatggaattcctcacctcccacaccagcgtggtcttccaacccggcttcgacagcccttactacaatggcatcaacccctatgcgctgggctttgcgatgtaccgcgatatccgccgcatgtgtgagcaccccaccgaagaggaccgccgctggttcccggaaatcgccggcagcgactggctgtccaccatcaagttcgccatgagcagcttcaaggacgagagctttatcctgcagtacctgtcgcctcaggtaatccgcgatctcaagctgttcagcatcctcgacgacgacctcaaggatgacctggtggtgccggccatccacgacgagccgggctatcgcaccatccgtgaaaccctggcggcgcagtacaacctgggcaaccgcgagcccaacgtgcagatctacagtatcgacgtgcgcggcgaccgctcgctgaccctgcggcaccagcagcacgaccgcaaacctttgggtgaatccaccgaggaagtactcaagcacctgcatcggctatggggctttgatatccacctggaaaccctgcaaggcgatcaggtgatgaagacccaccatgtgccaccgcgcagcgatcacaacgacaacgactacggccgattggacctggctgtcgttcatctctgaaacagcaaagcctccattggtcaggcacaggcggtatcctgtgcctgaccaatggaggctttttcatgaaaatctataaagtcggcggtgcggtacgggatcgcctcttgggcatcccggtcaccgatattgaccgcgtcgtggtgggcgcgactgccgaagagatgctagccaagggctataagccggtgggcgcagacttcccagtgttcctggacccgaaaaacggcgatgaatacgccctcgcccgcaccgaacgcaaaagtggccggggttacggcggctttgcgtttcacgcgagccccgaagtgacgctggaagaagacctgatccgtcgcgacctgaccatcaacgccatggccgaagacgatgacggcaacttgactgacccttatcacggccagcgcgaccttgaagcccgtactttgcgccacgtttccccggcgttcgccgaagatcccctacgcgtactgcgcgtggcgcgatttgctgcacggtatgcgcccctgggttttaccgtcgcgccacaaacgctggagctgatgcgtcaactcagcgagtccggcgaattggaagccctgacgccggagcgcagctggaaagaaatctcccgggcgctgatggaagatcaaccgcaggtatttatccaggtgctgcgtgactgccaggcgctgaaaaccttgatgcccgaggtcgatgcattgttcggcgtgccacaacctgaagcccatcacccggaaatcgacaccggcgtgcacaccctcagcgtgctagaacaagccgctttgcatcaacagccactgactgtgcgctgggcctgcctgctccacgacctgggcaagggtacgacgcctgtggataagttgccgcagcacatcgcccacgaacaccggggcttgacgctgatcaagacggtcaatgaacgcttcaaggtgccgagggattgccaggaattggcactgctggtgggccaatatcacacccatggccatcgggctctcgagctgaaggcctcgaccttgctggagttgctgcaaagtttcgacgtgtaccggcggccgcagcgctttgaagagttcgtggtcgcctgcgagatggacgcccgcggtcgcaagggcctggagcaaagaagttatccacaggcggattatctgcgcggggcggccaaggcggcccgcgaggtagccgttgcgccactgctggagaaaggtttcaaaggcccggagctgggtgaggcgctcaagcgcgaacgactaaaagcgctgaaggcctacaaagaacaacacgccctgatgtaggagcgagcttgctcgcgaaaaacctgagagcgctgcgctatcgttgacgttcttcgcgagcaagctcgctcctacagaagagcgtttggtgtcagtggctggccctgccattcgaacgcgacaggcgccagcacctggtcgatctgcgcatcgcgccacaactcggctagcgtcttgcccgcctcgggatgcacgcgctccggcgccatcaacgacagcggccacaacacaaaggcgtttttcaggatctcggccctaggcaggatcaaaccgtcaaagttgcccaccaggtcgccaaacaacaacacgtcgatatccaacggcagccctttgcggtccggcgcatagcgaccattgtcggcctcgatgaatttcaaccggcgatccagttccatcagcggcagatcggtatacgccgacaccaccagattgaagaacggcccactcttgatgcccaccggctggctttcgaacaccgccgagcagcgcatatcggtcaagaaactcgccagcgcatccaagccggcgcacaggtgagactcacgctcgatattgctgccgaggccaaggtaaacctgagttagcgacatccgcgctcgatctccacgcccacgcccttggcagccggcacggcaccaggcttggtcagcttgaggtgcagccagggaatctggaattcactcatcagcacttccgccaggcgctcggcaaaggtttccaccaactggtactgggattgctcggcaaaggcctggatgcgcgcggacacgctggcgtaatccagcgccagggtcaggtcgtccccggccgcagccgggcggttgtcccaggcaaagctcaggtccaggcgcaggcattggcggattccgcgctcccagtcgtaggccccaatgacggtgtcgacttccaggccttcgataaacactctgtccaagcactcttctccgcagcacgacaagggcgcgatgccccgttagaatcagggcgtcctcgcccggaatagttagcatgttttggtcactggcgattttcgcctacctgctcggctcgctgtccttcgccattttgctcagccgcctgacgggaaaccccgatccgcgaatgagtggctcaggcaatgccggcgccaccaatatgttgcgcctggccggcaagaagctcgccgtgctgacgctgctgggcgacctgtgcaagggcttgttgcccgtgctgatcgccagcctggccggcctgcccctgcaacagcaggcctggatcggcgtctgcgcggtcctcggccatctgtttcccctgtacttccgctttcgcggcggcaaaggcgtcgctacggctgccggcatgctgctggggatttatccaccggcagcgttgctggctgtactcgcctggctgctgacgttctacctgacccgcaccagctcactcgccgcgctgatcgccaccccgctcaccctgccgttgctggcctggcaagaaccggcggcgctgctgccgatgagcgtgctgacactgctgatcgtctggcgccaccggggcaatttacgcgacctgtttgccgggcgcgaacggcatttttaaataccttcaattcacgttgcggcgttacagcggcgacaactgctccatcggccaacgtgcctgcacgctgatcgccaggctttcatgctgcccggcctgcaggcgctggcaaccggcgtaggcgatcatcgcgccgttgtcggtgcagaattccggccgcgcgtagaacacatcgcctttcatgtcgccgagcattttttccagcgaagtgcgcaaggccttgttggcactgacgccgccggcgatcaccaggcgcttcatgctggcctgcttgagggcgcgtttgcacttgatggtcaaagtctccaccacggcctgctggaacgccagcgcgatgtcgcaacgggcttgctcactgtcgtccccggcgctgacgctgtgctgccaggtgttcaacgcagaggttttcaagccgctgaaactgaacatcaggccggggcgatcacacatcgggcgcgggaaggtgtagcggccggccacgcctttttcggcaagacgggcgatttccgggccgccgggataattgaggcccatcatcttcgcggtcttgtcgaaggcttcaccggcagcatcgtccaaagattcacccaaaagggtgtattggccgattccgtccacctgaaccagctgcgtatggccgcccgaaaccaacaaagcgacgaacgggaactgtggcggggttttctccagcatgggagccaatagatggccttccatatggtgcacgccgagcgccggaatgccccaggcaaaggccagcgcctgggcgcaagaggccccaaccagcagggctccgaccaatccggggccagcggtgtaggcgatggcatcgatctcggtcggcacgcagccggcctcgtccagcacctggcggatcaggggcagcatgcgcttgacgtgatcacggctggccagctccggcacgacgccgccataggcacggtgcaggtcgatctggctgaacagcgcatcggccaggagcccgcgttcactgtcgtaaagtgcgacaccggtttcgtcgcaggaggtttcaagtcccagtactagcatgggtttgcgccttgtagaggctgaattcgaaggcgcgcataatagtcgccactccccctcccgactagcggttttcgatcagaggctttgcattccgggcaatgaggggttaacatccgcaacccttaaaaaccgacgacctcagccgcgaattttttgcgacgagaacgttgatcccggtaatgaaagaaggtagctctggatgccagccgtcaaagttaaagagaacgaacccttcgacgtagctctgcgtcgtttcaagcgctcctgcgaaaaagccggtgtactggctgaagttcgtagccgcgaattttacgagaagccaacttctgagcgtaagcgcaaagcagcagccgctgttaagcgtcacgccaagaaagttcagcgcgaacagcgccgcgccgttcgtctgtactaatacacagacgttcgtagcaagcttctgccaagcccggccctcagccgggctaatggcatttgcggatatcgcttgatgcttcaccgttgacgccgcacatgcgaccgagacaactgcttcacacgtcaggactggctcttttgccagcggtgcacgtctcttctgacgagcctatcaaggctactgacgagcacactcattctgtaaacagccgaccaaccgtgtcgactgcgcccaacgaggcgtttccgaggcccatcaacggccaagaccggacgccggggcaacatttccacaccgaagactgatcagaaactaacgtcagtgaatattcggcagatacacttccgtacaacccatgcagtcgctggatgctcgagcactcgatacgcgcgcttgaacacctcacgggccctcatttacacgcagtgatgacgagaacgccatggccgggctgattccccagagctttattgacgaccttctgaaccgcaccgacatcgtcgatgtggtcagctcgcgcgtgcaaatgaagaaagccggcaagaactacaccgcctgctgcccgttccacaaggaaaagaccccgtcgttcagcgtcagccccgacaagcagttctactactgcttcggctgcggcgcgggcggtaatgccctcggcttcatcatggaccacgacaacctggacttcccccaggccgtcgaggaactggcgaaagccgccggcatggaaatcccccgcgaagaaagcggccgcccgcacaaaccgcggcaacccaccgattcgccgctgtacccgctgctgaccgccgctgccgacttctaccgtcaggcgcttaaaagccatccgcagcgcaaggccgccgtcgactacctcaagggacgcggcctcaccggcgaaattgcccgcgactttggcctggggttcgccccgcccggctgggacaacctgtacaagcacctgagcagtgacaccctccagcaaaaggccatgatcgacgccggcctgctggtggagaacgccgagaccggcaaacgctatgaccgcttccgcgaccgcgtgatgttcccgatccgcgacagccgaggccgcatcatcgcctttggtggccgcgtactgggcgacgacaagccaaaatacctgaactccccggaaaccccggtgttccacaaaggccaggaactctatggcctgttcgaagcccgcaagaacaaccgcaacctcgatgaaatcatcgtggtcgaaggctatatggacgtgatcgcgctcgcccaacaaggcctgcgcaacgccgtcgccactttgggcaccgccaccagcgaagaacacatgaaacgcctgtttcgtgtggtgcccagcgtgttgttctgcttcgacggcgaccaggccggccgcaacgccgcctggcgcgcgctcgaagctacgctgtcgagcctgcaggacggacgccgtgcgcgcttcctcttcctgcccgaaggtgaagacccggacaccctggtgcgctccgaaggcaccgacgcattccgcgcgcgcatcaatcaacacgcgcagccgctggccgactatttcttccagcaactgaccgaagaagcagatccgcgctccctcgaaggcaaggcccatatggccaccctcgcggcaccgctgatcgataaagtaccaggcgccaacctgaagtccctgatgcgcatgcgcctgctggaaatcaccggcctcagtggcgaagccgtcagccagctggtgcataacgcaccgcatgacgcagcgccacccgcctacgacccaggcatggattacgacgccatgccggactactccgacttccaccaaccccaggaggcctacgcgccccaacaggagtggacgccgaagaaacccggtgccggcggcaagaaatgggacaagaaaccctggagcaagaacggcaagcgcggcgacggcgatgaggcctacgccccgcgcaccccggttgccgtggaagcgccgacgctgattgccctgcgcacgctcatccaccacccgcagctggcggagaaagtcgagagcgcggatcattttgccaacgagagcaacacctatgcccaggtactgatcgccctgatcgaggcggtacagaaaaatcctaagctaaactcaattcaattgatggctcgttggcatggcaccgaacaaggccgcctgctcaaagcactcgcggaaaaggagtggctaattgacggcgataaccttgaacaacagtttttagacaccattactaggttatccgcgggtcagcacacgcagaccctcgatgaactgatcaagagagcgaggcagccgggattgtcggctgaagagcaaattcagatagcaaaacagatgcgcgacctcttaaaacagaatgtttccgcatcaaacccgacctcagctggcgtgtgaggtcatagctcgggtataatcctcggcttgttttttgcccgccaagaccttcagtggatagggtgttatgtccggaaaagcgcaacagcagtcacgtatcaaagagttgatcgttctcggtcgtgagcagggttacctgacttacgcggaggtcaacgaccacctgcctgaggatatttcagatccagagcaggtggaagacatcatccgcatgattaacgacatggggatcaacgtattcgaagctgcgccagataaggattcccttatgctggcggacgccgataccgacgaggctgccgcagaagaagcggctgccgcgctggctgctgtggagaccgatatcggtcgtaccaccgaccctgtgcgcatgtatatgcgtgaaatgggtaccgtcgagctgctgacacgcgaaggcgaaatcgaaatcgccaagcgtatcgaagagggtatccgtgaagtgatgggcgcaatcgcgcacttcccaggcacggttgaccacattctctccgagtacacccgcgtcaccaccgaaggtggtcgcctgtccgacgttctgagtggttatatcgacccggacgacggcattgcgccgcctgccgctgaggtaccgccgcctgtcgatgccaaggctgcgaaagcggacgatgactccgaagacgacgacgctgaagccagcgacgacgaagatgaagtcgaaagcggtccggacccgatcatcgctgcccagcgtttcggtgcggtttccgatcaaatggaaatcacccgcaaggctctgaaaaagcacggtcgcgccaacaagcaggcgattgccgagctggtggccctggctgagctgttcatgccgatcaagctggtgccaaagcaattcgaaggcctggttgagcgtgttcgcagtgccctggagcgtctgcgtgcccaagagcgcgcaatcatgcagctgtgcgtgcgtgatgcccgcatgccgcgtgccgacttcctgcgccagttcccgggcaacgaagtagacgaaagctggaccgacgcactggccaaaggcaaggcgaaatacgctgaagccattggtcgcctgcagccggacatcatccgttgccagcagaagctgactgcgcttgagaccgaaaccggtctgacgatcgccgagatcaaggacatcaaccgtcgcatgtcgatcggtgaggccaaggcccgccgcgcgaagaaagagatggttgaagccaacctgcgtctggtgatctccatcgccaagaagtacaccaaccgtggcctgcaattcctcgacctgatccaggaaggcaacatcggcttgatgaaggctgtggacaagttcgaataccgtcgcggctacaagttctcgacttatgccacctggtggatccgtcaggcgatcactcgctcgatcgccgaccaggcccgcaccatccgtattccggtgcacatgatcgagacgatcaacaagctcaaccgcatttcccggcagatgttgcaggaaatgggtcgcgaaccgaccccggaagagttgggcgaacgcatggaaatgcctgaggataaaatccgcaaggtattgaagatcgcaaaagagccgatctccatggaaaccccgatcggtgatgacgaagactcccatctgggtgacttcatcgaagactcgaccatgcagtcgccaatcgatgtcgccactgttgagagcttgaaagaagcgactcgcgacgtactgtccggccttactgcccgtgaagccaaggtactgcgcatgcgtttcggcatcgacatgaataccgaccacacccttgaggaagtcggtaaacagtttgacgtgacccgcgagcggatccgtcagatcgaagccaaggcgctgcgcaagttgcgccacccgacgcgaagcgagcatctgcgctccttcctcgacgagtgacaccagaacccccggcccaggccgggggttttgttttgtatagataaaatccctcgcaacgcccctccctcgcaatgcccgtctacactcgaaacattccccgtgccataacgagaccgttatgcccagattgccgactgtgttactgctgtcgctgctgacctggaccgcaacggctggcgcgttgactctcactgatgatgagcgtggctggttggcggaccatcaggagctgcgcctgggggtggacgcgtcatggccaccctttgaataccgtgacgaagagggtcgctaccaaggtttggcggcggattacgtgcgtctgatccaggatcgcctgggtatacgggtcaagctgatcgaaccggtgaactggagcgcggtgctggagctggcccgcaacaaccagctcgacctgctgcctggcatcatgtccacaccggagcgccaaggttacatggcgttcactcgcccgtacctggacttccccatcgtcatcctggcccacgaaggcggggccaaaccgcgcaacctgaaggatctctacgggctgaagattgccgtggtggaaaactacgcgccccatgaactgctgcgcacgcaccatcccgacctcaacctggtggccatgccgaatgtgagttcgacgctgcaagccttggccacggacgaagtggatgcggtcgtcggcgacctcgcctcaagcgtctggagcctgcgccaactcaagctcgacggcttgtacgtcagcggcgaaacgccctaccgctaccagttggcgatgggcgtaccgcgcgacaacaaaatgctggtgagcatcctcgacaaggtactggccgaccttagcgcggaggaaaccgacgcgatccagcaacactgggtcggcagctttaccgaccaccgtacgttctggaccgacttgctgacttacggcctgcccacagtgttgctgctgagtacggtgctggccgtggtgatccggatcaatcgccggctcagttcggaaatctcccgccgcgtagccctcgaacaggaactgcgcagcagcgagtaccactatcgcggcctggtggagagcttgtccgcgatcgcctgggaagccagcgttaccgatttcacctacagctatgtatcaccccacgccgaggaactgctgggttacccgcgggcccactggctgattccgggcttctggcgcaacatcattcaccccgccgacctgattcgcaccgaatcctactgccaacgcgaaacccgcgccaaccgtgaccacagcgttgattaccgggtcatcaccgccgacaaccgttgcttgtgggtgcgtgacatcgtcagcctgatcgagcacggccatgagcccgtgctgcgcggcttgatgatcgacatcagtgaggcaaagcgcaccgaagaggccctgcaactgtctgagcagaagttcgcctcggtgttccagcaatgcccggacatcctggtgattgcacggctgtccgacggctgcctgctggaggtgaacaaagcgttcgaggaccaggtcgggctgacagccgaacaggtcgtgggtaaaaccgctaccgagctgaacatctggggcatccagggcgcaggccccgatctgctgcagcggttgcagaccaccagcatccgcaacctggaaatgcccttcctgcgcagcaatggccaagccttcaccgggctgatttccgccgaaccgtttcaactcgacaccacagaggccatcgtggtggtggtgcgcgacatcacccaactcaaggaaacccagcaacagctgcaaacctccgaggagaaattcgccaaggccttccacgcctcccccgacggcttgctgttgagccgccagcgcgatggcctgctgatagaagtgaacgatggtttcagccggatcacaggtttcaacagcgccgcctccgtcgatcagtccaccttggacctgggcatctgggtcgacctcaacgaacgcaaacacatgctcgaactgatgcagcgcgatggctttgtgcgcgacttcatctgccacatacgccgcagcgatggtcagattcgcctgtgcgagctatccagccgcccactgccgattggcgatgacgactgcatgctgaccatcgcccgagacatcaccgaacgccaactgatgcaggaaaaactgcaacaagctgccaccgtgttcgagagcacagccgaaggtgtgttgatcaccgacacccggcagaacatcagcgccgtcaaccgtgccttcagcgaaatcaccggctacagcgaggccgaagccctcggtagcaccccgcgcctgctcgcttccggcctgcacgacagcgcgttttatgcggcgatgtggcaccaattgaccgcccaagggcactggcaaggcgagatatccaaccgtcgcaagaacggcgagttgtaccccagctggctgaccatcagtgccgtgcgcaaccgcgaccagttgatcacgcatttcgtcgcggtgttcgccgacatttccagcctcaaactggcccaggcgcgcctcgactaccaggcgcatcacgaccctttgaccggcttgcccaaccgcacgctgttcgaaagccgactgcaggccgccctcaacggccaccaggaaaccggcaaacaaggcgccgtgctgtttcttgacctggaccgtttcaaacacatcaacgacagcctcggccacccgatcggcgacctgctgctcaaagacatcgccgtacgcctcaaggagcaactgcgcgacatcgacaccgtggcacgcctgggcggcgacgaattcatcattctgctccccggcctgcagcacgccaacgacgcccagaacctcgccaataaactgctggcctgctttacaccgccgttccaggccggtgagcacgagttctttatcagtgcgagcatcggcaccagcctctacccacaggacggcaccgacgtcgccacgctggtcaagaacgccgacgcggcgatgtaccgctccaaggccaaggggcgcaaccgggtcgaaagctacacccgcgacctcaccgcccaggccaacgagcgcgtggcgctggaacatgaactgcgtcgcgccatcgagcgcaacgaactaagcctgtactaccagcccaaacggagcctgatcacccaggaactgatcggtgccgaagcattgatccgctggcatcaccccacttttggcgacgtaccgcccgaacacttcatcgccctggccgaagagaacggcatgatcctgcagatcggtgattgggtgctggagcaggcctgccggcaactgcacacctggcaaggcacgttcgaggagttcggcccactgtcggtgaacctggccggcgctcaactgcgccaccccggcttgctggcacgcatcgaacagctattgcgcgactatcgactcgacccgggctgcctgcaactggagatcaccgaaaacttcatcatgagccaggccgaagaagcgctggaggtgctgcaccaactcaaagacctcggcgtacaactggcaatcgatgacttcggcaccggttactcttccctcagctatctcaaacgcctgcccctggattacctgaagatcgaccaatccttcgtccgcggcctgcccgacgacccccacgacgccgccatcgtgcgcgccatcatcgccctgggccacagcatgcaattcaccatcatcgccgaaggcgtggagaaccccgcacaacaagccttcctcgccgccgaaggctgcgaacagatgcaaggctacatcgtcagcctgccgctgccgccggagctttttgctgctacgtttcttcgtatgagcattgaggatttttcggatggcacagcggggaaaccatcgttataatccgcgacctgttacagggcctatagctcagttggttagagcagtggactcataatccattggtcgtaggttcaagtcctactgggcccaccaattcgaaagccgcgcattgcgcggcttttgtgtgtctggcttttgttttacgcacgaatttctgctggaaagccacgctctacgaccgggtcatcctcattcaagccaagcaattctgcgacatggaagacaagaggatccccggtctgctcggtctcagagcgcttaccattgtcatcgtactgatcgtatatcgctccagggtggcaatatctctggaggacatcgtcgaccatgttgaccaagccttctaacggtattgccttacgtcttttcaggcagaacgagcactcagcagtcacgccggctcgcctgatcaatccaatgagataggcttcgttcaagcattggtggcagatcaggtcttcatccatggggctgtgcctagcagagttcagatggcggtgattctaagtcacctcagagttgtggcccgatgaaaatttgctgaactcccagtcgccgccttaagagtctctctttagggggctacccctggcatggatttttcagctgctaaccaatgcaatgcaccactgcccatgaaagcctcctgtggcgtctatgcggatccaagagaacctttcggcggtagccacacgccatattatgagctagacaaccagaaaaactctcagcatgattcatcattgcctaaaagcttgcctagcaagctaagtttttgctcaacaatcagccctcatatcaaaacacaatgctttaaacctacctctcgaatgggggaatgcatggataaaatttccgaacacacccgccaaggtggcatactttcgaatgccatgtttgatattgaacatgcgctgggaatgtttgcctacagctactgtacaattccagctgaggcaatctacgataaagaattattgaaacctatgatggatgttatatccgcctgccacatctacataatcggctacacccccataataaactttatcgatgctaatcaagacggcgaaaaacttactttggacttcagaattctcagcaaaaaccattctgtctcctatgacattcctggattaactctcaagaacagaaacgatgctccgtatttggaagacgaggacggagaggcatactggccgtctgcaacagaaactcaaactagactaaacatggagtcagatggcattaattttgatgtcaaatacattggccaagcctatggccaagatggctcaaggaatgctatagataggcttttgaagcatgagacgctgcagaaaatcgccttgaaaggggttccggacggctacaaactctccttactactgcttgctatacagccaacaaaccaattgataaccatgatgaatccatttgcgaaaaatggagatagtggagatttaagaatacagcagggacttaacaaagcacagaataccaccgaggtagaaaaaatatccatgtatgaagcggcccttattaggtacttctatccagaatacaataaagaattcaaagacagttttccatctacaaacttgaagatccttcatgactgctacgataaggatttcagtgccatagtagcggagatatgtatagatgagttgcctttcatgctgtgctcacaagaggtcaagccaaagcactatcatgtaattaagcatcacttgcacaaacaggaagatcgaaggatgtttttcgggatgtgatcagcctagcgacaggacgtccggtagaactctagtgggtgggttgttcctaagcttacatagttgtcggccagaatcatgaggcttgttatgactctggcccttgctcactgagccatgctagctggttctcgacccaaactcggctatccatttttgcagagctaagacgtcggcctcaaagacatccagttcaagagcgctgctggacaactcatccgactgggcatgctcaaataccgagtagcgtgtcatcaggtcatcaatgaataggcagtcctcattcgtcaccttggcgaccttgtgcagcttgccctgggtgttgattgcacgccggaaacgtcctacgacatctgccagcaggatgaactcaatcgtcttttcaacgatgatcctgaagtcactgcacgcgctcttgccaagcgcctcgtaagcatcgacctcagcgttttcctggtgcttcttgaggcgtgtgatagcgttatctatcagcccgcgcaccgcactttccggctttaggtctcgagcgcttgcagtcgcgacgatcccggcagttttcgccatcctctggagtgacgttagcgttggcttgactgagggcattcctgggatcagctcccattttttggtgacggcttctacctgagccaccagagaaagccgatgagtgaaaatgatgacctgccttgtctgagacagggccacgagacgctcgaccactttttcttcaaagtcctggtctagcgaagagatcgggtcatcgaaaatgaacggggctagttggtttgagcctgtagtgtccgcaaggaacgcggccaaggcagcgatcctggtttctccttcgctcaagatgtagtccagcccatgggtgccattcgcgcccaccaggctcaagccgaaggtgatcttgcccttgcccccggatttactttgcggcgcgattggaaggcggtggccgccgaggcgtttcaactcatctaggaatcgagattgatagccggcatcaagctccgtcttcgccagctcgtttttcttcgtagtcagggcattggtggcggctgagcgcgaagctttatcaatcgctgcaacggcgatcaacctagccctttcagcagtaattgatgccttgttttgataaagccactgcttggcttggagttgctggactcggctctgcatcgtctggcgatgctcatctttcaacaaggccgacaggctcagttcctcttcgatgagttttgcagatttggtctttgccgcctcgtttatgcccgaccagtcgaaaggttgcagggtgcctacagggctacccagtgcaatttgatcaaaccgtgctttcagcaggccaagccagctgagcccgtcggcttcttcaaagcctagagtggacatgtggacaatccagtcagcttgtcctggaagaaccggcagccgctttttgcggtcggcaaatccattttcagccgtcttggcggttgtttcgaggccgtcggtcacgaacttctcaaaccctgtcagtcgggctttggcgtcctcgctgaggctttggtggcaaagtacacaacgtgagtcagctgagacgttagggaatgctgtatcaacgtaggctgtactggtggaataagcgcgtgcttgctcccacattttctgccaagtcgctgaaccaactccctcaagctctgctttcccgaaaatagccgccgctgcctcttcgcaagtgctcctcgcttttacggcggtattcttgaggttttccagttcgaccgccgtcgcgtcgttcagacccagctgaagtgtcgacatcgctgtatcaatactcttcagcgcggttttttctttgttgatagctaaaagacgtccagcaatgtccttctctgcaagcaaggcttcgctctctatacgctcccgatcaagctggtcggtatacaggcattccttatcgatgctcgcgggcgtagtcgtgctcttcaatgcggaaagccatttcgcttctgctgtttgactaaggctctcagccatggcgggtagcgctctgctgagcaaagccttttctcttgcaagctcagcgctaacggcatctgcggtggcgatcagcgcagatacaaacttcatcctgcttggctcatagcaggcttcggttcttcccatgtactgattggcagccttgctgtcgaaaatctgcgcatgccgtagggccttgtgagggccgctggggatatcccagtgaatatcggctgactttccgtcgatggacaccttgaattgagcacggcatgccgtaggcgccgaatcaaacacgttgctgtgaatctcgtccttggaacgtgatccgcagatctgcttgagcaaccttgcaaacccgctcttgccggttccattctgtccgtagataacagacaggttgctcttaccgaaggggaggttggcgccaggctttattgcgttcaaaccatgcacatccaggatctcttcaatccgaagcaggggtctattggcaacctgcgataacgtgccgggcgttacgttcaaaaatcctgtgtcagcctcacctttggcttcgaccttgcagagcctggacagctctttgacttcgtcttggttcagctgccgcttcgagtcgataagcattcgagctgcagtctgcaaccatttggggcgtccattcagccacgtctcgaaatcatcagctacaaccggccctgcctcaatcttcttcatggtgcgctcatctcgcggggtaatccctgagcgtaggcgttaactggctttttggtattattgggccatcacaatcgttgcaagatgtgccattcaagacgatttgaggggcgtgagtgatgccagcttaagctctgatgtcactgtgactcagcgcagtcgcctcgacgtaccgggcaaggggtatattgatggcctcttgctaaagaaaattactcaactgccttcaagcatctccaactgccattctgggccagaagcttgaggatggaagcccgcagggccaaaacctggcgaagccagggtttggtttacgacagccgtcccccagcgggggcaagcctaaaactgcaacggcgtcatcgccatcgagctgcagttatgaagacatccggcattccccgcgtaacgcgtcagctttgttcaccagcccaggattttctcaacccctgcggtgagttcagcccgatcagtgaccctgctcaagtctttgtgatgaagggcgtcctctgcggcgtgcagctctttaaccttcgtcttgtcgtgcttattcaggagttgctctaggaagtacaggacttcgtagccttcgtccttatctacctgacgacgatccttgatgccggcataaggcgagtcgccttcatctcgagtccaagtgtaggtatagacatcggtttgaaggtttgagcgtttcagagttacagccatgtgaactccatttgcgtgatatagctgatatggaattgagcgctccgtgcatccaaaggccccgcctggtaggcgagcatggttgtgctcgggctagctaatcgtgcctcagcttttgcgtagtgtcactggattagtaacttcttgctatcacgcttcaggttactgctatgagttgatcttgtaagttcaattgggatggggtgaaaccttgcttggcatcttaagggccagagtagtgggtcgcactgcccggctggcttgcctatagccggggaatttaagggtcggttcgtcgtccacgtggaaaacaggtttggcaccagcgctcaaaggtatctcgcggtatagggcggtttggtctacgacgccttccggttcaagccactctcgggcgctaaaatagttggcccgtagatcataacttcagagccttttttcttttgttgggcggtatagctcaagaaatactcgtcctggcggtagctggtgtagatatcttttatttcgctcacgttgtcatatgaaacgatccaaggcttgtcgatactgcccagcgcgttagcgatctgtacgtgatcgtcgtgcacataaaagtttcgatagagaccagatcccttgatgtaataaggaggatcaagataggtgagggattttttggggagagtagggatgattttattaatgaagccaagagcgtcttcattgtagattttgattcgattcttatatttgccaattagctcaatgcgcttaattagctcaggcttattgaaacgaacatctagcttccatttgcctgcttgttcttttccgccaataactcctgccttcaagatgcccgagcgattagtacgattaagaaagaaggttgccatggctagatccacgactgagcaatcttcgggattatcaagcacggccttaaacctatgccagttttccatggtgacaggcgtgtcggtaataactttgctgatatcatcagtatgatgtactaccgaatgccaaaacgcgtagatagccggatctaagtcattgatatgtataactgaggcgtattcgtggaacatgagctccagagcaacaccagctccacccgcgtagggttctgcgtaatgaccatcatgcaagccgttcacttcaaaaacttgcttaatgaagtgagcaaattttcccttaccaccagggtagcgtagcggtgtggaaaataccctagaagcgcccatgaatcttatcccagcttgtcaagctgtacatgagaacacatgctagggcattttccaatgcttagcgccagatggcttcaagcataggttggtattcttccgcaatgtccttcagctcggatggcagcggggcgctatgagtcccgtgcacgaacaggttgaagtgatctaccgatcctggctggtcataggagctggcacgcttgaaaatggcctttgccgctgaggctgctattttcttttcagcttccaggtgtttaacgaccgactgaaccttcatgactaacttgtcaccatttcctccgccacgaagttcattgttggtatcccaacgcaaaacggtttttcctgcttctttctgcaatcttgcgtattcatcgcaagttgtttcaatgaacacgcggaaagttattgcgactgcgttagggcactcatctacccgcaagaccgcccgaagttcgttatatattgcattgatgcgggagttggagatctttagcgaccaaggcgttaagtattttctagcgcgtgcttgcggctttgcacgaatccccggtggagtttgaggctcaggttttatattttcggtgccgtccggcttgcccggctgagtcccgcccgattgagggctactggctacacctggtcgagtgccgttgccaccacctggctgcacgttagtacctttttcatcgccagagccaccgttgccaccagcgctgtgaccgccccctgtgcccccaccattcgtcgtgtctggccgagccggtctggcctttacctttgcggcttctgccaaactgtcgggcagtatttcaggtggaatatgcccaagggtaactacctggttctcatacttacgcacgtcgttcacgttgtatccatgggatacaaacatatcgagcatgaactccagcgcgggcgcgatctggtcgagtggcagctgtggtgtcaggattttattttcgacttttaaccggaaggtgttctgcccaagcgtagacgagaagatccgcgtaagggtcgttacgtcgatctcgaagacgtccagagccgccttgttcgtgaagatgtgctggttgtcgacgatcaggtttctgatctggcggccaatagattcaatgccagtctggcgtgcccggcgttcgtctcgaatgtcactgtcccagccaacccgtcctgccccccgattctcacccgtatgctttagctcaatccatacatccccgtcagcgcgggtagacactacgctgcattgaaggctttcaggcaccccatccgtcaaattatgatgggctttcagaaagcctttatagccgcgatctgcaggacaaaggtcgggacgctgaaggagcttaagggctgtaagccggcgatttccttcaaggactataaagttgccgtcttcgtccggtgtcacaagctgcagctctgtagggtcgagaccgttttcaacaatatgttcagccaggcgaagaattttcttggcttcctccggattggagagcatcagcttgatagcttcacgctgattctgggcgacatcgttgccgaatcgcacgttctcctggtcgagcttaatttgatccagggagataacgcgtatatcccgcatcattgcgtcaattttcataaattatccattcggcgattcggtgctggcgcaatgataatacaaagcgcgggcataggagggtcgccgtttcttggtctagccgccctttgtagctggcggcgacgcaggagcggtatacaccgatttccccctccaagttggtaacatttagcattgagattaaaaggaaaggagcagaaaggtgcgcccaaataatgccaatttcagtgaaatcacggtgcgatttggaaaaccctgctgccttcaatgaagcgatggcgcatgtcgctcatcgccgcttccgcccgaaccgttgagcagaccggcgaccacgagctccgatgaggcttcagagattttccgcaataagctcgtctgaggtgaacgctgcacggtgatttagatgttccctcgcacacgcgaggtgggcgcattgtgacgagccatctaaatacaacaccagagttgtatttaattagctatggccacatgatcgtcaaccggaaacaatcactagatttcacgggcagttgaccggtgatccgaccggacggacagtacacgaacggacactttacataccactgtacggaccggacacatggttgacgggtgtacggggacatggtggacacttttcggcggataaacttcgccgggaaatcatcatgccttgggacacgagagataccatgagcctgaa

SEQ ID NO: 18 - DNA, 755582 bp, Pseudomonas nodulensis
  misc_feature (38593)..(38658): n is a, c, g, or t
  misc_feature (108556)..(108588): n is a, c, g, or t
  misc_feature (122549)..(122561): n is a, c, g, or t
  misc_feature (131716)..(131792): n is a, c, g, or t
  misc_feature (200493)..(200558): n is a, c, g, or t
  misc_feature (277622)..(277635): n is a, c, g, or t
  misc_feature (308597)..(308670): n is a, c, g, or t
  misc_feature (336788)..(336873): n is a, c, g, or t
  misc_feature (491043)..(491077): n is a, c, g, or t
  misc_feature (680048)..(680088): n is a, c, g, or t
aagtgctcgatggccgtcaattttccacattcaaggaagcccaaatagcatttgatcgatggcgtgaggtgtacaacttgcagcgccctcatcaagcgttggattacaaggtacctatggaccgataccgtgccagtccctgggcttatccgcagcaactatcggattttgagtatggaccagacgatgtgctggccaaggtttatcacagccgatttcgctttcagaaacgctacttcagcatcgctaaaggcttggttggccatcacatcgcaatacggccgaaccctgaaaagagcgggttctttgatgtctacttctgccatcactttctaagaacgttcgacgtgagcaaacctgactatggttaagaatgtgtccaccatgtccccgcacatgtgtccaccatgtgtccggtccatacaataccacataatggttcaagtccgtgtgggcccaccaaacaagaaagccgcgcattgcgcggcttttgtgtgtctggcaacctcacttcgcaaacaactgcccaatatccttgaacgccttgaactccagcgcgttcccgcacggatcaaacagaaacaacgtcgcctgctcccccacctgccccttgaaccgaatatgcggttccagcacgaagcgggtttgccgggcctgcaagcgttcggccaaggcgtgccaatcttcccagcccagcaccacgccaaagtgcggcacgggcacgttgtggccgtcgacggcgttggtgtgggctgattcctgggaggcggttttcgggtgttcgtgaatgaccaattgatggccgaagaagttgaagtcgacccaatgatcgcttgagcgtccttcttcaaggccaaagacttcaccgtagaaatgccgcgcagcggccaggtcgtataccgggattgccaggtggaaaggggcgagtgtcatcaggtcaaacctctatgggcgttaagtgccccgagtttagccttgctgccaacgatgaaaagacgatagtttttgcatcgagctcaaattatttcgatcaatcgagacgcccatgctgcgtgaactgaagacctttatcgccgtaacccgccacggcacgtttgcggcagcgggcatgcatatcgggctgacgcagtcggcggtgagtgcgcagattcgtcagttggagcaggcgctcggtgtgtcgctgttcgaccgtaccgggcgccaggctacgttgaatgctgcgggattgcgcgccttgccactggcgagagagatcctggagaccttcaaccgcatggcggtgccggtggatgcaaatgagtaccggggtgagttgaaggtgggcgccatcaccactgcacaaaccggtttgttgccccaggcactggtgcgtttgcgtcaggcggcgccgacggtggagtgcaagctgatacctggcgtgtccctggagctgctgagccaggtggacgccggtgagctggactcggcgatcatcatccgcccgcccttcgacctgcccaaggagctgcacgtgcaggtgctgcgcaaggagccgttcgcgctgatcgtgcctcacacgttggcgggtgatgacccgttgcagttgctggcgacgcagccccatgtgcgctatgaccgcgcttcctttggcggtcgcctggtcagccgattcctgaaggaacataaactcgacgtgcgggtagcattggaattggatgagctggaagccatcgtcaagatggtcgaatgcggcctgggcgtatcgctgattcctcaggccgggttgtggctggaacgctcgcccaacgtgcgaatcatcccattgggcagccggaccttttaccgcgaaatcatcctgctgagccgctacagtcaacgccacctgcccgtaccgcaactgttcacccgctgcctgctcgccgacgccaacctgtaagatgccaacacactgcccccccgcatcggagccctcgccttgcccgccctagatgaaatcgaccgccaactgatcgccgccctgcagatcaacgcccgcgaaagcgtggccatgctcgctcggcagttgggtatcgcgcgcaccacggtgacgtcacgcctggcacgcctggagaaaacccaggtgatcaccggttatggcgtgcgcctcgggcagcgggtggtcgatggtggtttgcaggcttatgtgggcattaccgtacaagcgcgctcgggcaaagaagtgttgcgccggttgagtgccatggcccaggtgcagcagttgtgcgcggtgagtggcgagtttgattatgtggcctggctgcgcacggattcgccggagcagttggaccaattgctcgaccagattggcagcgtcgacggcgtggaaaaaaccaccacatcgatcatcctcagtaacaaactggatcgcggccaaccaatctgaccaacagcttcgtcattctgactaaaaacagatcaatccgacgacactttgcgtcttattaacgaacgctacactccctaaactggctgccatcatttcctatactcagcgggtcgtgccccgccgagtcatcagccaggtcagccatgaacacgtccaacaaaagcaatcgccaccctgcagacggtaaaaaacccatcaccatcttcggcccggacttcccgttcgcctttgatgactggatcgaacaccccgccggcctgggcagcatccccgccgcccaccacggcgccgaagtggcgatcgtcggcgccggcatcgcgggtctggtggccgcctacgaactgatgaagctgggcctcaagccggtggtgtacgaagcctcgaaaatgggcggccgcctgcgctctcaggcctttgaaggcgccgaaggtatcatcgccgagttgggcggcatgcgctttccggtgtcgtcgacggcgttctaccactatgtggacaagctcggcctggaaaccaaacctttccccaatccgctgaccccggcctccggcagcacggtcatcgaccttgaaggccagacccactacgcgcaaaagctctccgacttgccggtactgttccaggaagtcgcggacgcctgggccgatgcgctggaagccggttcgcagttcggtgatatccagcaggccatccgcgaccgcgacgtgccgcgcctcaaggagctgtggaacaagctggtgccgctgtgggacgaccgcaccttctacgacttcgtcgccacctccaaggcgttcgccaagctgtcgttcctgcaccgtgaagtcttcggccaggtgggtttcggcaccggcggctgggactcggatttccccaactcgatgctggaaatcttccgcgtggtgatgaccaactgcgacgaccaccaacacctggtggtcggcggcgtggcccaggtgcccatgggcatctggcgccatgtgccgcagcgttgcgcccactggccggccggcaccagcctgagttcactgcatcgcggcgcgccacgcgcgggcgtcaaacgcattgcccacgccgccgatggccgtttcgccgtcaccgacaactatggcgacacccgtgaatacgccgccgtgctgaccacctgccagagctggctgctgaccacccagatcgaatgcgacgaaagcctgttctcgcaaaaaatgtggatggccctggaccgcacgcgctacatgcagtcatcaaaaactttcgtgatggtcgaccgcccgttctggaaagacaaagacccggaaaccggccgcgacctgatgagcatgaccctcaccgaccgcctgacccggggcacctacctgttcgataacggcgacgacaagccgggggtgatctgcctctcgtactcgtggatgagcgacgccctgaaaatgctgccgcagcccatcgacaagcgggtgaagctggccctcgatgcgctgaaaaagatctacccgaaggtcgatatcaaggcgcgcatcattggcgatccaatcaccgtgtcctgggaagccgacccgcacttcctcggggccttcaagggcgcgttgccgggtcactatcgctacaaccagcgcatgtacgcgcacttcatgcagaaggacatgcccgccgaacagcgtgggatttttatcgccggtgacgatgtgtcctggacgccggcctgggtcgaaggcgccgtgcaaacctcactgaacgcggtgtggggcatcatgacccacttcggcggcagcactcacccggagaacccggggccaggtgatgtgttcgatgaaatcgggccgatcgccctggcggattaaggagttgaacatgcgtgtcgccctgtaccaatgcccgccgctgccgctggatgtggccggcaacctcaagcgcctgcatcaactggcgcatgaggcctccgatgccgatgtgctggtgctgccggagatgttcctcagcggctacaacatcggtgccgaagccgttggcgccttggccgaggcgcaagacgggccgtcggcgcaggccattgccgaactggccagaagcgccgggctggcgattctatacggctatcctgagcgggccgcagatggtcagatctacaacgccgtgcagttgatcgacgcccacggccggcgcctgtgcaactaccgcaagacccatctgtttggcgacctggaccattcgatgttcagcgccggtgacgatgatttcccactggtagaactcaacggctggaagctcggtttcctgatctgctatgacctggagttcccggaaaacacccggcgcctggccctggctggcgctgagctgatcctggtgcccactgccaacatggtgccgttcgattttgtcgccgatgtcaccgtgcgggcgcgagcctttgaaaaccagtgttatgtggcctacgccaattactgcgggcatgaaggcgagatccagtactgcgggcagagcagcattgccgcgccgaatggacagcgcattgcccaggccggcctggatgaagccttgatcgtcggtacgctggagcgccaatcgctccttgacgcccgcagcgccaatcactacctgcaagaccgccgccccgagttgtacggcgcgctgcacaagccctgatccagccggtttgttagcataggcacattctatgtttcggaagtgcccatgcctgcgccggccccccctcatcaccttcacctgaccctggccaatggcctgcgggtttccttgcgtcatgccccacggttgaagcgctgcgccgccgtgctgagcgtggcggccggcagccatgatgtgccgttggcgtggccggggctggcgcacttcctggagcatttgctgtttctcgggacagagcgttttcccacggatgacgggttgatggcctacgtgcaacgccatgggggccaggtcaatgccagcacccgtgagcgcaccacggacttcttctttgaactgccggatgccacttttgccgggggcctggagcgcttggccgacatgctgacccatccgcgcctggcgctggaggatcaattgcgtgagcgtgaggtgctgcacgcggaatttatcgcctggtcccaagatgcacaggcgcaacaacaagtcgcactgttggaaggtttggcggtgaatcatccgctacgtggctttcatgcaggcaaccgcgacagcctgccagttgagcgagagacctttcagcaagccttgcaggaatttcacacgcagttctatcagagcgggcagatgaccttgagcctggccggcccacaatcgctggaggcactggaaaccttggcacagcggttcagtgaacagctgacttcagggcttctgcgcccgcaatccgtgcccccggccttgatgccggggcaagcgcagcactatcagcacattgccaatgatcatctgcaccaggtcatcacctgtgatgcgccccgtgaagcgctggagtttctctgcacctggcttaacgcgtcggcacccggcggattgctggccgaactgaaagcgcgacacttggcgagcgcactgcaggcgtcggtgctgtatcacttcgccgggcaagcagtgctggatatcgacattacgctcagtggtcccgctgaatcagccacacaagtcgaggcgttgctgtacgactggctgagctttttcgcacacagcgactgggctgcgttgcgcgaagcgtttgctctgctggccgctcgccaacagcaaacccaagacgccctggcattggcccgaaatgaccgccaggacctgtcggaacaggatgccgtcgcccttgaggccctgcttgaatcgctgcgcttgccaccctccgaacacccatggcaactgccgccgaataaccctttcctgcgcccgccggtgaaggaagaacgcgccggcctgattcgcggccagaccagcgcccaccgaggcttgcgcacgtttgcccaggatcgctcccgagggcgtcgtgatgcatcggcactggccttcagccaggcattggcggacgacagccacgaaggcgcgttgtatctgcaatggcaatcagctccgccacatcaggaaagcgcgttgcagtcgttgcgcgacaatgcccgccaggcgggtgtcgaagtgtcgttcgaaaacctgggcagtcactggctggtgaaaatggtcgggctacaggagccgatcccagcagttctggaagtgctggcgcaacgcctgggcgatccgcaagaggcacaagccgccgcgccgcccatgatcgccatccgcgaattgctcaaggcgctgcccgcttgctgcgccacgaccacgtccgaaacagccgcgtgggacaccgcacgttggcaaggcctggggctgggtttctctaccgcccatgaagccgcgatcaaaaccgctgcggcccgcctgccggggcaacctgcaagcctcaatcatgtcgcgccatccctcagcggccaacgtatttggcatgaagtagaagccgactcaaacgaagccgccctgctgctgttttgtccaacaccacgccaatccttggcggacgaagccgcctggcgactgctcggccatctgctccaggcgccgttctaccagcgcctgcgggtagagctgcaaatcggctacgccgtgttcagcggtatccgacagataaacggccagaccggcctgctgttcggcgtgcaatcgcctagcctgtccctgtcaggcattgccgatcacctgcacaccttcctgaagcaactgccagtactgatcgatagccgcgacgacttgggcaacctggccttggccgagcagttcagcgcacagacactgcccaacgcccaagccgccgaacttctgtggcacgcccatctggcaggccatccgtcggactacctggctcaacttcaaacccagatcagaacctgtacccgcgcagaattgcagcgtgccgccgagcagttgaacgacgccgcaggcggctggcgctgcgtggccaacggaccgcgcatctcgactacgtggcaagcggcagggtgatcattgccgcccctgcaaaaggctttctccctcaagacagcgctaacttgaaaagaattgagtaatattcccacgcacacatctgaacatctccgactggaggtggactatatgtattacttggtagtaaacgtcccatcccttcgtaggagtaagaatatgacctggtccaaacctgcttacactgatctgcgcatcggtttcgaagtcaccatgtacttcgccagccgttaattcgctgggtactacaacgcctcggtttgcccggggcgtttttgttttgagcttgatggagctgccatgtttgtccagattctaggttccgccgccggcggtggtttcccgcagtggaactgcaactgcgtgaactgcgcgggttttcgtgatggcagcctgcgggcccaggcgcgcacccagtcgtccatcgcgatctccgacgatggcgtgaattgggtactgtgcaacgcctcgccggatatccgcgcgcaactccagggctttgcaccgatgcaacccggccgcgccctgcgcgataccggcatcagcgcgatcatcctgatggacagccagatcgaccacaccaccggcctattgagcctgcgcgaaggctgcccgcaccaggtgtggtgcaccgacatggtccatgaagacctcagcaccggtttcccgctgttcaccatgctcacccactggaacggtggcctggcctggaaccgtatcgagctggacgccagcttcaccatcccggcctgccccaacctgcgcttcaccccgctgccgttgcgcagcgcagcgccgccttactcgccacaccgcttcgacccgcacccgggcgacaacattggcctgatcgtcgaagacctgcgcactggcggcaaactgttctacgccccgggcctgggcaaggtcgacgcgccattgctggagatcatggccggcagcgactgcctgctggtggacggcacgatgtgggatgacgatgaaatgcagcgccgtggcgtgggcacccgcaccggccgcgagatgggccacctggcgcaaaacggccccggcggcatgctcgaagtgctggaacagttgcccgagcagcgcaaggtgcttatccacatcaacaacaccaacccgatcctcgatgaagactcccccgagcgagcggaattggtgcggcgcaatgtcgaagtggcttacgacggcatgagcattgaattgtaggagctgacgagatgactgacacgccattgaccaccgccgaattcgaagccgccctgcgagccaagggcgccttctaccacatccaccacccgtatcacgtggcgatgtacgaaggccgcgccacccgcgagcagatccagggctgggtcgccaaccgtttctactaccaggtgaacatcccgctcaaagacgctgcgatcctggccaactgcccggaccgtgagatccgtcgcgagtggatccagcgcctgctcgaccacgatggtgcccccggtgaagacggcggcatcgaagcctggctgcgcctgggacaggcggtaggcctcgaccccgaccaactgcgctcgcaggaattggtactgcccggcgtacgattcgcggtagatgcctacgtcaacttcgcccgccgcgccagttggcaggaggccgccagcagctcgctgaccgagctgttcgcgccgcagatccaccagtcacgcctcgacagttggccgcagcattacccgtggatcgacccggccggctatgaatacttccgcacccgcctgggccaggcccgccgcgatgtggaacacgggctggcgatcaccctgcagcactacaccacccgcgaaggccaggagcgcatgctggagattctccagttcaaactcgacatcctgtggagcatgctcgatgccatgagcatggcctatgaactcaagcgcccgccgtatcacagcgtgaccgagcagcgggtgtggcataaagggatcaccctatgagctttgaccgcagcaagaaaccgacctggcgcccaggctaccgttaccagtacgagccggcgcaaaaaggccacgtgttgctctaccccgaaggcatgatcaagctcaatgacagcgctgcattgatcggtggcttgatcgacggcgagcgcgacgtggcggccatcatcgccgagctggagaaacaatttcctggtgtgcctgagctcggtgaagatatcgagcaattcatggaggtcgcccgtgctgagcactggatcacccttgcctgaaaagccggccaccggcctgccgctgtggttgctggccgagctgacgtaccgctgcccgttgcagtgcccgtactgctccaatccgttggactttgccgagcagggcaaggagctgacgaccgagcagtggttcaaggtgtttcgcgaagcccgcgagatgggggccgcgcagctggggttttccggcggtgagccgctggtgcgccaggacctggccgagttgatcgctgaagcacgcaaactggggttctataccaacctgatcacctccggcatcgggttgaccgagcagaagatcagcgacttcaagaaggccggtctggaccatatccagatcagtttccaggccagcgacgaacaggtgaataacctgctggccggctcgaaaaaagcctttgcgcagaaattggagatggcccgtgcggtgaaggcccacggctacccgatggtgctcaacttcgtgacccatcggcacaacatcgacaagatcgaccgcatcatcgagctgtgcattgcgctggaggcggactttgtcgagctcgccacctgccagttctacggctgggcacagctcaatcgggtgggcttgttgccgactcggcaacaattggtgcgcgccgaacgcatcaccaacgaatatcgcgccaagctggaagcggaaggtcacccgtgcaagctgatcttcgtcactccggactactacgaagaacgcccgaaagcctgcatgaacggctggggcagtatctttctgacggtgacgccagacggcaccgccctgccctgccacggcgcccgacagatgccggtgcaatttcccaatgtgcgcgaccacagcatgcagcacatctggtacgactcgttcggcttcaaccgctttcgtggctacgactggatgcccgaaccgtgccggtcatgcgatgaaaaggaaaaggatttcggcggctgccgatgccaggccttcatgctcacgggggacgcgagcaatgccgacccggtgtgcagcaagtccgagcagcacggcatcatcctgcaagcgcgggaagaagccgaatacgccacccagaccattgagcagttggcctttcgcaacgagcgcaactcacggctcatcgcaaaaggctgacggcctcagcgcttggcgatgatgtacaccgcgtgcacgatgcccgggatgtagccgcacagggtcagcaggatattcagccagaacgcgccgccgaaacccacttgcaggaacacacccagtggcggcaacagaatagcgatgatgatacgaatgaaatccatgggatcagctccagaaaatcggctcgtgtgagccgtgtagctaatcgaccttgggcattcgtgagggttcagtgggatctggcgttgggccatccaggcaaaaaaacgcccccggccaaaagaatcaggccggaggcgctgcgtagaccgcgagacggttcaggaataagggttaaacggcgatacccttgcggcattgcagttgggcggtacgcacgcgggagaaggcgcgggccaggcgcaggagcatttcgtcgatgttgcttttgctcacggtcagggccggggtgaagcgcaggcagttgggttgcggagcttgaaggatcaggccttcgtgcagcgccgcttttacaacagcatccgcagaatcatccgacaacgtcaggccccacatcaggccgtggccacgcagttgaccgtggtcgtagcggtaggccaggcgggcaagaccttcgcccaggtacaagccggtctcacacacgtgatccataaagccgtgctccagcacggagtcgagtactgccagcccggccgacgccatcagcgcgttgccatggtgggtgccttccagctcgcccacttcgaagcaacaggccttgccgcgagccaatagcgctgcaacgggaaccccaccacccaggcctttgccgagggtgatgatgtcggcacgtacgccgtattgctgctcggcgagcaaagtgccgcagcggcccatgccggtttgcacttcgtcgaggatcagcaagatccccagttcacggcacaggcgctcgacgcccttgagatagtgctctgtcgcggggattacacccgcttcgccctggatcggctccagcaggatggcgacagtttgtgcgtcgactgccgcatgcagggccggcagatcgttgaagggcacatggctgaaacccggcaactgtggttcaaaacggttttcaagcgtacttgccgacgccgacatcgccgcaaagctacggccatggcaaccaccgctcgcgctgatgatgcgataggcgccgccgcgatgcagttggccccatttgcgcgccaacttgatcgcggcttcaacggcttccgcgccgctgttaagcaggtaagcctggtcactgccggtgcgatggcacaggcgctcggcgaggttgagttgagcgcggttatgcaagccgttgcctgggttgatcagcgcctgagtctggtcggccagtgccttgatcaacacctgcgggctgtggccgaggctgttggcggcgtttccctggctgaaatccaggtaagccctgtcatcgctgtcccacagccaggaaccctggccgcgcacgaagacttggggtggccgcgctacggagggcatcagggattcgttgggaggattatcgctgggcgtctccagaactaaatcgtccaagctcggcgcggggcgacggaacagattcatgattcacccccaatagtaatcggaccttggtcgctgcgacccgtcattattgccttgaggttttttgccttgcctatgtaaacgctatcaacataaacgctgttcattgcccgatccggccctgtaagccctgcgaataggcgctagactaggcgcctcgggggccagcggccatttcgattttccagctttttcgataagtaagtcttatggatttcaagcaactgcgttatttcgtcgcggtgtatgaggaaggccacgtaggccgtgccgccgagcgtctgtcgatctcccagccggcgctgtcccagcagattcgccagttggagcagaacctggatgtgagcctgttcgaacgcagcagcaagcgcctgctgccgacactggcggcgcatacgctgtacaaccacgccctgccattgatcgatggcatgcagcaggcggttgaggccctgcgcaacttcaagggccaggcgatgcgcacgttggccatcggcgtgctgcaaaccgtgcacaccagcctggtcccgcagatgctcgagcgcgtgcgcaaggcccagccacatttggtggtgcagatctacgaattgactggaattgagattgagcggcggctactcaacggctcgctggatatcggcatcagctacttgccgccacgccagccagggttgcacggcgtgttgttgtacgaagatgagttgaaggtggtcatcccagaagaccatcccttgcgcgaattcaagaaagtctcactgaagcaggccgccgagttgccgatgttgctgctcggggaagaattccaggtccggcagatctggcagggccaactgtccaacctcgggcggcgcccgcaagtgcaggcagagctcaataccatggcgggaattctcgatagcctgcctcataccaagctggcgacggtactgccggggcgctcccaggatgaacacaacagccaggcgctgctgtggaaacccttgagtgaacccagggtgccgctgaaagtcggtttggtatgccgcgatgtgcaacgccagcaggcgacggtggcgttgctgcgcaccttgctggaagacgtgatgaatgccccgcaggcgcctgcctgactttttcgcgggcaaaagaaaaccccgccgaagcggggctttgcagactgtttccctgacatccatttcactccgccgtcctggcagaatcctacgtgtccgtgttgttgctttgcgcttcctgcgcgacgtccatgtgaagtagattatccgtggatccaatatggcgatagaggacgaatagcagtacgtcatgtaagagaatgcttacacgccctccaagcctttagaacagggcttcatccagcaaaaacagtgattcgctaccggcttttaccgacgcactcagcgagtggatgcgcggcaacaggcgcgcaaagtagaagcgtgcagtcccgagcttgctggcgtagaagtcttcttccgactccttgcccaacgcggccttggccatgcgcgcccacatgtaggcatacgccatgtagccaaaggcatgcaggtactccaccgacgccgcgccgatctcattcgggttggtcttggcgcggtccagcacccaggcggtcaactcatccaggttatccaccgccacgcccagcggcttggtgaattcggccagctcggcccccgccgaggcaatgaacgcgcggatctcatcggcaaacagggtgtagaacgccccgccactgccgacgatcttgcgccccatcaggtccagggcctggatgccgttggtgccttcatagatctgggtgatgcgcacatcgcgcaccagctgctcctggccccactcgcgaatataaccgtggccgccaaatacctgttggcccagcacagtggtttccaggcccaggtcgctcaggaatgccttggccaccggcgtcagcaacgccaccaggttatctgcacgctcgcgggctgcggcgtcgtcgctgaacttggcgatgtccagttgcgtcgccacgtaggtggagaacgcccggccaccttcgttggcggctttcatggtcagcagcatgcgccgcacgtccgggtgcacgatgatcgggtcggccattttgtctttggcctgggcgccggtcggtgcacggctttgcaggcggtcgcgggcgtattcgatggcgttctggtaggaacgctcgccggacgccaggccctggatacccacccccagacgctcgtagttcatcatggtaaacatcgccgccaggcctcggttcggctcgcccaccaggtaaccaacggcctcgtcgaagttcattacgcaggtcgccgacgcctggatccccatcttgtgctcaatggagccgcagctcacagcgttacgggcacccaggctgccgtcggtgttcaccatgaacttcggcaccaggaacagcgaaatccccttgggccccgccggcgcgtccggcagcttggccaggaccaagtggatgatgttatcggtgaggtcgtgttcaccgccggtgataaagatcttggtcccgctgactttataggaaccgtccgcctgtggctcggccttggtgcggatcatccccaggtcggtcccggcgtgggcctcggtcaggcacatggaaccggcccactcaccggaatacatcttcggcaagtaagtggccttgagcgcttcgctggcgtgggtgttgatcgacacacaggcgccagacgtcagcatcgggtacaggccaaaggccaggctcgacgagttgatcatctcttcgacctgggccgacacggccttgggcatgcccatgccgccgaacgcaggatcaccaccgacacccacccagccgccttcagcataggttttgtaggcctgtgggaaaccgtccggggtaaacacggcggtgttgtcccaacggcaaccttgttcatcgccaccacggctgagcggggcgatggatttggcggtgaccttgccggcttcttcgaggatggcctctacggtttcggcgtcaacggtgtctgccaatgccggcaactgggcccaagtggtggcgacctcaaagacttcgttgaggacgaagcgcatatcacgcagcggcgctttgtaatcagccatggcaaacctcgtgagaacgtgaaaagtaattcggtaagagtcggttttacaggctcagagtgtacccgaacaacttttcagacacatagggtccacttgtgactgattggtatttttaagtcattaccacgcaaacgcctccgcaggcagactcatcaggcattcgctgcccgcttccacggccgcgcgatgggtagccgtacgcggcagtagacgcttgaagtagaactcgcacgtggccagcttggccttggcaaaatcgccatctggctgttcaagggcagcgatcgccattcgcagccacaggtacgcgagcaccacgtaaccgctgtacatcaagtaatccaccgccgccgcgcccacttcatcggggttcttcatcgcggccatgccgaccttcgtggtcagctcaccccattccccgttcaactgattgagttgcgccacatagcccttgagctgagagtgctcggcattcgcggcacagaacttatgcacgattttggtaaacccacgcagcaacttgccctggctgcccagcaccttgcgccccagcaggtcgagggcctggatgccgttggtgccttcatagatcggcgcaatccgcgcatcgcgcgccagctgctccatgccccattcacggatgtaaccgtggccgccgaagatctgcatgccgtggttggtcacctcaaggccggtatcggtcatgaaggctttgcagatgggcgtgaggaacgccagcaggtcttcggcatcctggcgctggccggcgtcactgctcaggtgcgcggtgtcgagcaattgcgcggtgaaataggtcagtgcgcggttgccttcgttgaaggccttcatggtcagcagcatgcggcgcacatcggggtgcacgatgatcgggtcagcagctttgtctggggccttggcgccggtcagcgcgcgcatttgcaggcggtcgttggcgtatttgatcgcgccctggaaactcgcttcgccattgcacaggccctgcatgccggtgcccaggcgcgcgtggttcatcatggtgaacatgcagttgaggcccttgttcggctcgccgatcaggaagcccctggcgccatcgaagttgagtacacaggtggcggacgccttgatgcccatcttgtgttcgatggaaccacagtgcaccgcattgcgctcgcctgtgtcggcatggaacttgggcacgataaacagcgagatacccttggtgcctgccggcgcatccggcagcttggccagcaccagatggatgatattggcgctcatgtcgtgttcgccggcggagatgaagatcttgctgccggtgaccgcatagctgccgtctgcctggggcacggcacgggtcttgatcaggcccaggtcggtgccgcaatgagcttcggtgaggcacatggtgccggtccattcgcccgctgtgagcttggtcagataggtgtctttttgctcggcggtgccgtgggcgtggatcgccgacatcgcgccgtgggtcagccccgggtacatgccccaggaggtgttgctggagccgatcatctcgctcagcaccaggccgagcgactgcggcaagccctggccaccgtaggccgggtccgccgccacgccgtgccagccgccctccacgtactgggcgaaggcttccttgaagcccttgggcgtggtgaccacgccattgtcgaaatgacagccttcttcgtcgccgctgcggttgagcggcgcgagtacgttctcgcagaatttcgcgccctcttcgaggatcgcgccgaccatgtccgggctggcgtcggtggcacccaacgcggcgtagtgaccgtggaaatcaaacacgttgtcgatcagaaagcgcatgtcgcgaaggggagctttgtactcaggcatggcaatgtctccgtcagcagatggtttcaacctactgccggccaacgcctgggacaatcactgtagaaccgctgaatacaccgccatcactcaaccggcagcgctctgcatgcgcaccgcgccacgccgggtctgcccggacgccaccacgcagttacgcccggcgcccttggcggcgtacagcgcctggtcggcggacttgagcacttcctcgggggagcgctgctcggcctggcgttcggccacgccgatactgatggtcaccgagacactggaggcgccgctgcccgaacggcgctggcgaccctgttgatcgtcctgggggcggtccgaattacgcagcttgatgtcgtagtcggcgatgatctcgcggatctcctccaggtgcggcatgcattcatccagggtcttgccggcgaacaccacggcgaattcttcaccgccgtagcgataggcgcgcccgccgccgttgaccttggacagcttgctcgccaccagccgcaatacctggtcgcccacgtcatgaccatgggtgtcgttgaaacgcttgaagtggtcgacgtcgctcatcgccaacacatagttgcgccccagccgctgcatgcgctcgttcagcgcacgacgccccggcaagccggtcagctcatcgcgaaaggccatttgataagcctcgtgggccacaccggcggcgatcatcagcatcacctggctgcacatgatattcagggtgaagggcaggatgaacgtctgcggcaacatccagaacaggcccagcaaccccaccagttgcgccgcatgcagcgggcgcggctggtaccagtattgcgccgccagggtcaggaagccgatcaggaacatcgggtacgacagctggatcaggctcatccagctgccatgcagcgccggccagcggatctccgccagccagttcagcaccgcctggggataactctgctccagcgccagggccacgctgcccaccgccagcaacaccgcgccacgggctacaaagtcacgaaacaggtgggtcttctcctgccacagcgcgtagatgctgaacaacaacggcagcagcaggcagcacaggtggaacaccacggcggcgtcttcgcgcacgcggccattgtcgcggtagaagtcggtctgggtatcgagcaggaagtaggcgatgtataccgtgatcatcaggaacagttcacgctggcggcggtacaccgcgcagtacgaaccaccgagcaacagcaccagggtcggcaacacattgaacagtgaggtgaagaaaacgttgaggtccttgacgtacgcagccgagagcccggccagcaagagcagcaacgaaggtagaaaatgactgaaacgtacagcggacacgcgtgacaagggtaaaactccgacccgcaaaaaatgatggcactgtgcctctatgtggacagttaagcacaacctgacacacatgcatcacattgccatcactgtaacggcagccggcggtaatccctgagtgctgcggtgtggttttttatcgcccacaaaaaagccgccgcccccgtagaggagcggcggctctggaagtgaacccggtaaggcttagtaagccaggccgaagtcttcttctttcatgtccatcaggttgttggcacccgacagcatggtggctttgtgggccagggtacgcggcaggatgcgctggaagtagaagcgcgcggtctgcagcttggcggtgtagaacgcttcttcggtggtgccggcagccagtttctcggccgccaggcgcgccatgtcggcccagaagtaagccaggcaggcgtaaccggagtacatcaggtagtccaccgaggcggcacccacttcttcgcggtctttcatcgcggccatgccgaccttcatagtcaactcgccccactctttgttcagcgcagccagcggtgcaacgaactctttgaccgcttcgttgccttcgttggcctggcagaacttgtgcacgatcttggtgaagcccttgagcgcttcgccttgggtcatcagcactttacggcccagcaggtcgagggcctggatgccggtcgtgccttcgtacagcatcgaaatgcggctgtcgcgaacgttctgctccatgccccactcggcgatgaagccgtggccgccatagatctgcacgccgtggttggccgattcaaagccgacttcggtcatgaacgccttggcgatcggggtcatgaaggccagcaggccatcggcctgtttcttggcgtcttcgtcggtgccgtatttgacgatgtccacttgcttggcggtgaagtacaccatcgcacggttgccttcggcaaaggccttcatggtcagcagcatgcggcgcacgtcggggtgcacgatgatcgggtcggcggctttgtccggggctttcgggccggtcagggagcgcatttgcaggcgatcgcgggcatatttcaggccaccctggaagccgatttcggcgtgggacaggccttgcagcgcggtacccaggcgagcggtgttcataaaggtgaacatgcagttcaggcctttgttcgccgggccgatcaggaaaccggtggccgcgtcgaagttcatcacgcaggtggcgttgccgtggatgcccatcttgtgttccagggaaccacagctcacggcgttgcgcgcgccaatcgagccatcggcgttcggcaggaacttcggcacgatgaacagcgagatgcctttggtgccggccggtgcgtccggcaggcgggccagtacgatatggacgatgttgtcggccatgtcgtgttcaccggccgagatgaagatcttggtgccggagaccttataggaaccatccgcctgaggctcggccttggtgcgcagcatgcccaggtcggtgccgcagtgtggctcggtcaggcacatagtgccggtccattcgcccgacaccagtttggtcaggtaggcctcttgctgctcgggcgtgccgtgctcggagatagtgttcatcgcaccgtgggacaggcctgggtacatgccccacgaccagttggcggcgccgaccatttcgctcacggccaggcccagggattccggcaggccctggccgccgtgctccacgtcgtgggccaggcttggccagccgccttctacgaattgtttgtaggcttctttgaaaccggtaggggttttaacgcccgactcactccaggtgcagccttcgatgtcgcccacgcggttcagcggtgccagcacttgctcacaaaacttggcgccttcttcaaggatggcgtcaaccatgtccggggtagcgtcctggcaagccggcaggctctgatagtgcgcttcatagccaagcagttcgtcacgaacgaagcgaatatcacgcaagggggccttgtagtcaggcatagcgataaacctctgctgatgtatctggaatgaacaaccgcgtggaagtgttggggcggtcaaacaggtgtttgaaacatacgtttacgacctggggatgtcaagcgtcgtccggatgccgtttgtcatgacgcgggtcaatggcgcgcacggtaacgcttgcggctagacgccacatgactgggggagtgtagaagttcagaaggacgacacagtaaaaatgtgggagggggcttgcccccgatagcgcagtgtcagccatacacacattggctggtccatcactatcgggggcaagccccctcccacattttttagcgccagcagatcaggcgtaggtgtcgatcagggtaccgagcatttcatcggaagccttggcgactttagcgccgagttccacttggaacttgccttgggccatttcaaccatgttgctggccgagttggacggctgggcgcggtcgttggcttgcagacggtcgctttgcgcgtccgatggctgagtggtcgcggcgctggcaattctgccggcggcctgatcgacacggttctgcccggactgaatgctgctcaggcccgagtaaaacgcgctgcttccagagatttccatggcgtaagcctgcctttagagaatcgtgaagttgaattgaagcagatatcccgtcaaagggctcgtcaaaaacactaatggcataatgccttgtcgatagccaaaatcagtcaagcaggtccagttgcaagtactcggcaaccgcttcagccccggcgtgcttgagtttcggcacacgccccaagaatggcgcaggcaggcgctcagccagggtggcaaggttttcttccagacgggaggtcttggggtcgatgatattcgccacccacccggccaacggcaggccatcccgggcgatggcttcggcggtcagcaaggcatggctgatgcaacccaggcgcacccccaccaccaggatcaccggcaatttcagcgccatggccaggtccgacatattcgcctggtcagccaatggcacgcgccagccaccggcgccttcgatcagggtgaaatccgcttgccgtgccaggatctgctgcatgggcttcaacaacgattgcacggtgagcgagaaacccgcctcccgcgccgccagatggggtgcgatggccggttcgaacgccaccggattgacctcggcataactcaacggcagcgagcattcggacagcaacgccaacgcatcggcgttgcgcaagcccttgggcgtgacctggcaaccggaggccaccggcttacccgccgcggtgcttctgccggcttgccgcgccgcgtgcaacagaccggcggcgatggtggttttgccgacatcggtgtcggtgccggtgatgaagtaggcggcgctcatagaggtttctccagtacggcatacaccacttggtaagtcgccggcaggccttgggcctggcggaaccgctcatacgcgtgcaccagtgcaacaatccgcgcgcgccccgtcaacccaccggggcgaccggggttgaggttatgcgcgcccagggccttcaattcgtgggtcaggctgcgcacatccgggtaatgcaacacatgaggacggcgctccaggctcaccacccgcaggccgctggccgcacacacttgttgatacgcctcgaaggtgcggaagcgattgacatgcaccaggccatccgccgcacgccagctctcgcgcagctcttccagggtgcccgtgcagagactggcgaaggccagcacaccgcccggttgcaacacccgatgggcctcgctgagtaccgcctcgaaattcgcacaccactgcaccgcgagggacgagaagatcagctgcacgctgtcagctttgagcggcaagcgttcggcgtcgccggcgatgaagtgctcggcgccacccagggggcgtgcgtggttgagcatgccttcggcgatgtccaacgcgatgccttggctggcgggccagcgctcccccagcacacggctgaaataaccggtgccgcagcccatgtccaaccaacgttgcggcgcggtatcggccggtaagcgcgccagcaattggcagcccaccgcccgctgcaactcggcgacgctgtcgtaactggcggcggcacgggaaaaggacgccgccacctggcgcttgtccggcaacgcacccggcagcggggcgtgggataaatcagtcatcgacgcactcatgcaaaaaagcctggatggcccccgctacaccgtgagggtcttccagaagaaaagcgtggccggcctgttcaatcaggccgatttcaacatccggcagcagggccagcaggtcgctggcggcttcggcgggcaccaacccatccaggccggcgaacaggtgcaactgcgggccgcgataggccaataaggcttcacgggtatccaactgggcgagtagctcaaggccgggcatcaacacactgggcggcgtgttcggcgcgctactgaccagcaggcgcgacagcccgcgcgggtcttcggcacccttggcgcacaacaaaccgaagcgtttgagggtgacttgggagtcggcatggcagccggcgaggaatgcatcgaaggtctcggcgggcatcgcgcttggccagccagcgtgggcgacgaaacacgggttactcgccagcgtcagcaggccgcagcaacgttcgccgcgccgcgccgccagttccgaggccagcatgccgcccagggaccagccgcccagccaggcgttgtccggcagcgtagcgtcgagttcgtcgagccactcgttcaggtcgctggagtccagtgcaggcaacggttcgatctgcacctgcaggtgctcgtccaaaccttgcaaggcggcggccaacggctccagcggcgatacaccgaggccccagccgggcagtaatatcagtcgatcacgcatggcctcgctccgaactgcctaacaagcggaaacacgcttccaatgcgtttaacaatagctgcacctgcgccgcgctgtgggctgccgtcaatgtcacgcgcagacgcgcgctgccggcgggcacggtgggtgggcggatcgccgtcaccatcaggccgcgttcacgcagcatctgcgacaggcgcacggccttggcgctgtcgccgatcaggatgggttggatcggcgtaaagctgtccatcagctccagcccaatctgctcggcgccctggcggaactggcggatcaggcggttgaggtgctcgcgccgccaatgttcgctgcgcaacagttccaggcttttcaaggtggcacaggccagggcgggcggttggctggtggtgtagatgtacgggcgggcgaactggatcaggctttcgatcagctcttcactgccggccacaaatgccccggccgtgccgaacgccttgccgagggtgccgaccagcaccggcacgtcctcctggctcaggccgaaatgctcgacgatcccgccgccgttggcgcccagggggccaaagccatgggcgtcatctaccatcaaccaggcgcctttggccttggtttcgcgggccagcgcgggcaggtcggccaggtcgccgtccatgctgaatacaccatcggtgaccactagggtattgccggtagctttctccaggcgcttggccaggctctgcacatcgttatgcaggtaacgattgaaacgcgcacccgagagcaagcccgcatccagcagcgacgcatggttgagacggtcttccagcaccgtatcgccctgccccaccaatgccgtgaccgcgccgaggttggccatgtagccggtggtaaacagcagcgcacgcgggcgaccggtgaggtcggccagggcttcttccagttcatggtgtggcgtggcatgcccgaccaccaggtgcgaagcgccgccgcccacaccccaacgcgaggcaccggcgcgccaggcctcgatcacctgcgggtgattggccaggcccaggtaatcgttattgcagaacgccagcagcggctggccgtccaccaccacttccgggccctgggggctgtcgagtagcgggcgttggcgataaaggtgttcggcacggcgggcagcgagacgcgcggcgagatcgaaagacatgcaggcctcgattaaacagatgtaggcggtcaagaatgtggcggggatccagtgtgggagggggcttgcccccgattgcaatctgtcagttgatgcaggtgtcgactgacccatcgctatcgggggcaagccccctcccacaccagccgtttcccacaggtggctggcatttcaatcaaacaacggcgttatagaactgctcgctgctcttctgctccaccaacgcctgctcgattgcggcctggtgcacttcatcggcatgttcttcacgggcttccggcaggatgcccaggcgcgcaaacagttgcatgtccttgtcagcctgcgggttggcggtggtcagcaacttgtcgccgtagaagatcgagttggcaccggcaaagaacgccaacgcctgcatctgctcgttcatcgcttcacggccggccgacaggcgcacatgggacttcggcatcaggatgcgcgccacggcgagcatgcggatgaagtcgaacgggtcgatgtcttcggcgttttccagcggcgtacccgccactttcaccagcatgttgatcggcaccgactccggatgctccggcaggttggccagttggatcagcaaattggcgcggtcgtcgagggactcgcccatgccgaggatgccgccggagcagatcttcatccccgaatcacgtacataggccagggtttgcaggcgctcgctgtaggtgcgggtggtgatgatgctgccgtagaactccggcgaggtgtcgaggttgtggttgtaatagtccaggccggcctgggccagggcttcggtctggtcctggtcgaggcggccgagggtcatgcaggtttccaggcccatggcctttacgcctttgaccatctgcaacacgtagggcatgtctttggccgacgggtgtttccaggcggcacccatgcagaagcgcgtcgagccgatggctttggcgcgggcagcctcttcgaggaccttctgcacttccatcagcttctctttttccaggccggtgttgtagtggcccgactgcggacaatatttgcaatcttccgggcaggcgccggtcttgatcgagagcagcgtcgacacttgcacacggttggcgtcgaaatgcgcgcggtgcacggtctgcgcctggaacagcaggtcattgaacggctgcacgaacagcgctttgacttcggcgagggaccaatcgtgacgcaaggtggcggtggtgctggcgctcatgggcgattccttgattatgctttggcaagcgctgcgggaagggcaatacccacaggcacgacacggatgctcggcatatttaaggaagattcatgcactgtcaaccgagacacaaacaccaggtttacatctggttaaataacatacaaacctgtttaatctgtgatgaagcgacacaatccgcccattgtgtgtgcaacgtctgcgaaaccgagctgccctggctcatggagcactgcgatgtgtgtgccctgcccctgccgatggagggtttgacttgcgggcaatgccaaaaaaatccccctgcgtttaaacaggtcatcgccccctggtcctacagctttcccatcgacagcctgatcagccgcttcaagcatcaggcacgctggcccctcgggcagatgctggcgtggctgttggcgcaacacctgcaacatcgcttcgataacaccggactcccccgccccgactgcctgctaccggtgcccatggcccgcaagcgcctgcgcgaacgcggctacaaccaggcgttaatgttggcacgctggctcagcagcgacttgaacattccccacgatgaacagctgttgttacgcccccatgaaaccgtggcccagcaggcactcgacgccaggacccgtaaacgcaacctgctcggtgccttcgccctggcgccccacgcccaggtgcagggccgccacttcgccctggtcgacgacgtgctgacgaccggcgccacggcccatagcctggcgcggttattgatgaacgccggtgcgaagcaggtcgatgtgtattgcctggcccgcacacccaaaccgggcagttgacttgactccagcccaccttgcccgcaacgttcggctcatcccagccaagcgtatccacatgtctctgccaacctccctcagccaacacatcatccgccgcccccagcgcattgccttactggcacatatcgccgagcagggttccatcacccgtgcggccaaaagcgcaggcttgagttacaaggcggcgtgggatgccatcgacgagctgaacaacctggcacaaaagccgttggtggaacgcagcgtgggcggcaagggcggtggtggcgcgaagctgacggccgaaggtgagcgcgtgctgcgtctttaccagcgcctgcaagtgctgcaagccgaagtgctgggttccgatgaagccgccagcgacttcaacctgctcggccgcttgatgctgcgcaccagcgcgcgcaaccagctgcatggccaggtgatcgccatcgagcagcagggccgtaacgacctgatccgcctgcaactggccggtggcctgagcctggacgcgcagatcacccatgacagcacgcaacgcctggaactggaaaccggcgtggaagtggtggcgctgatcaaggccggctggctggaagtgctcgcatccgagcaagctgcaacacctggacacaattgcatgagcggcaccgtcgacgtcattctcgacgccgacgacggccccagcgaagtgcgcattgccctgcccaatggccaggttttatgcgccctggcgcggcccgaggcactcaaggacgtgggcgccgccgaaggtaaaaccatcaccgtgcaattcgcgccaagcaatgtgctgctcggtacgccggtgtaggcgcagcccgccttcaaactgcaacaatttcgtcacgcccgctccttatggtgtctgcaaaaaccgcagggagcctgagatgagcctattagaagaaaaccaagccaccgacctggaacagatggtcggcctcacccgccgccgctttatcggcgccggtgcgctgtgcggtgccgcgatgttcctcggcggcaacctgctgagccgcagcgccctggccgtcaacgccgccagcgccagcccactgctgggctttaccagcatcgccgccgccaccagtgacgccatcaccttgccgccaggctacagcgcctcggtgctgatcagttggggccaaccgctgagcaagaacgcacccgccttcgacccgtccggcaacggcacggccaaggcccaggagcagcagttcggtgacaacaacgacggcatgagcctgttcgccttcccgggcgacgacaaccgtgcgctgatggcgatcaacaacgaatacaccaattaccgctacctcttcgcccacggcggcgcgccgcaatcggccgaagacgtgcgcaaggcccaggccagcgaaggcgtgtcggtgatcgaagtgcggcgcaagggcgacacctggcagttcgtgcaggactcgcgctacaaccggcgcatccacggcaactcgccgatcaatctcagcggccccgccgccggccacgcctggctgaaaaccagcgccgacaaaaccggcaagaaggccctcggcactttccagaactgcgccaacggcaagacaccgtggggcacctatctgacgtgcgaagagaacttcaccgactgttttggcagcagcaacccacaacaaaccttcgacgccgggcagaaacgctacggggtggtagccgccagcaaagacatcaactggcacccgcacgacccgcgcttcgacatcgccaagaaccccaacgagctcaaccgccacggttgggtggtggaaatcgacccgttcgaccccaagtccacccccgtcaaacgcaccgccctgggccgcttcaagcatgaaaacgccgccctggctgaaacccgtgacggccgcgctgtggtgtacatgggcgacgacgaacgcggcgagttcatctacaagttcgtcagccgcgacccgatcaaccaccacaaccccaaggccaacaaggacctgctcgaccacggcactttgtacgtggcgatcttcgatgcgggcgacagcaacgccgatcaccccaagggcaagggccaatgggtcgagctcagccacggcaagaacggcatcgacgccagcagcggcttcgccagccaggccgaagtgctgatccacgcgcgcctggccgccagtgtggtgaaagccacgcgcatggaccgcccggaatggatcgtggtcagccccaccgatggccaggtctattgcaccctcaccaacaatgccaagcgcggtgaagacggccagccggtgggcggccccaacccgcgtgagaaaaacgtctacggccagatcctgcgctggaaggccgacgcggataaccacggttccacggaattcagctgggacctgtttgtggtggccggcaacccgggcgtgcacgctggcacgccaaagggtggctcgtcgaacatcaacccgcagaacatgttcaacagccccgatggattgggtttcgacaaggccgggcgcttgtggattctcaccgatggcgactacagcaacgcgggtgacttcgcgggcatgggcaataaccagatgctctgcgccgacccgtccaccggggaaattcgccgtttcatggttgggccggtggcctgtgaggtgacaggcatcagcttctcgccggatcagaagacgttgtttgtggggatccaacacccaggcgaaaccggcggatcgacctggccggagcatctgccgaatggcaagccgcggtcgtcggtgatggcgattcggcgggatgacggcggtatcgtcggcgcctgacaaagcctcatcgggggcaagccccctcccacattgattgcattcacatattttgacttgtgaacacagtcagtgtgggagggggcttgcccccgatagcaatggcacagtcaccacctatctcagccccggtgcgttaccatacccggccggacgcggcgccctgctgcgcgcaggagttcgcatggcccacccgtttgaaacactcacccccgacctggtcctcgacgctgtcgaaagcatcggtttcctcagcgatgcgcgcgtattggcgctcaacagctacgaaaaccgcgtctaccaagtgggcatcgaagactccgagccgctgatcgccaagttctatcgcccgcagcgctggaccaacgaggcgatccttgaagaacaccgcttcaccttcgaactggccgaatgcgaagtgccggtggtggcaccgctgatccacaacggcgaaagcctgttcgaacatgccggcttccgcttcaccctgttcccgcgccgtggcggccgtgcgccggaaccgggcaacctcgaccaactctatcgcctcgggcaactgctcggccgtttgcatgcggtgggctcgacccgcccgttcgaacaccgtgaagccctgggcgtgaagaacttcggacacgactccctcaccaccttgctggaaggcaatttcatccccaaaagcctgctgccggcctacgagtccgtggcccgcgacctgctcaagcgcgtggaagaggtgtacaaggccacgccgcacaagaacatccgcatgcacggcgattgccaccccggcaacatgatgtgccgcgacgagatgttccacatcgtcgacctggatgactgccgcatgggcccggcggttcaggacctgtggatgatgctcgccggcgaccgtcaggaatgcctggggcaactgtcggagttgatggacggctatcaggagttccacgacttcgacccgcgtgaactggcgctgatcgaacccctgcgcgccttgcgcctgatgcattacagcgcctggctggcacggcgctgggatgacccggcgttcccccatagtttcccgtggtttggcagtgagcggtattggggcgatcaggtgttggccttgcgcgaacagctctcggcgttgaatgaagagccactgaagctgttttgactgacaaatatccttacaatcgcgctttgttagctgcctaagcaaggatttcgcaatgcaagccgccaacccccgcaaggggtacatcctgggcctgagcgcctatgtcatctggggtctgttcccgctctacttcaaagccatcgccagcgtgcccgccgccgaaatcatcgtgcaccgcgtgctgtggtcggcgctgttcggcggtttgctgttgatggtctggaaacatcccggctggttccgcgaattgcgtgacaaccccaagcgcctggcgatcctggcccttagcggctcgttgatcgcgggtaactggctgacctacgtgtggtcggtgaacaccgggcgcatgctggaagcgagcctgggttactacatcaacccgttggtgaatgtggtgctgggcatgttgatcctgggtgaacgcctgcgccgtttgcagtgggtcgccgtcgggctggctgcggtgggtgtggcgcagcaggtgtggcaggtgggcagcttgccgtgggtgtcgctggtactggcgttgacctttggtttctacgggctgatccgcaagcaggcaccggtgaaggcgctgccagggctggtggtggaaacttggatgctggtgccgattgcggttgcatggctgctgttcaatccgaccgcccacagtgcgcagatggaattctggggcacctccgaagcctggtggctggtagccgccggcccggtgacactgatcccgctggtgtgtttcaacgccgccgcacggcatttgccctataccgccctgggctttttgcagtacgtcgcgccgaccctggtattgctggaagccgtgctgctgttcggcgagcatctggcaccaagcaccttgaccgccttcgcgttcatctgggcgggcctggtggtgtacagcgtggatatctggctcagcgcacgcaaacgttgatcaaataacgtacaaacctctgcaagccataatctacgtggcttgcagacatccaccccaaggttatccacaacctgatccccgccatttgtgcacaagcccttgaaactgctcgttttttgctcaagtagcgaagaaccccgcacggcgtggcctggcgccgggtctctacaggttatccacaggcccatgcaagatttccatgcataaccctgtgggcagattattcctcgtggtgcagctccaccatcagatcatcggccagggtttccagggacaattgcaaagtatccagggataacgctgccggcacctgcaacagcgcttcagcggtgaacagcgggtcaccgctcatgggcgccgggcgcacgtccgtgctcaggctctccaggttcacgccctgcttgctcagcagcgccgtgatctcgcgcacaatgcccgcacggtcattgcccaccagcgtcatcatgatcgacttggaggccgaggcctgcccgctgctgccctcacccaccagcacgcgaatgccgtgtgtggataagtcctccagcgcaccgaccagcgcctgacggttctccgtaggaacgccgacgcgcaggatcccggcaaattgcccggccatgtgcgccatgcggctttccagccagttgccaccgtgggcggcgatgttctgtgcgatgcgctcgaccagaccgggtttgtcggcggcgataattgtgagtacaagatggtccatggcaaagccctctgaattcaatctacaaggtggactcggaagccctcgaaaacaaatcgtgtaccatttttatatttatctggaacaatccaatagttttttgagaacatctggttctccgctgtgaccgtacgaccaaagtgggtcgctaaacgacgtatttagtctaattttcacaaccgcaagtcatcatgtagtatgcccaaccgtgcactacataatgaaaatctgaaaaagcgcataagctccgcagagtgaggcaagcaatgactgaacacgttcaagtcggtggcctgcaggtcgccaaagtcctgttcgacttcgtgaacaacgaagccattcccggtaccggcatcactgccgaccagttctgggccggtgccgacaaggtcatccacgacctggcaccgaagaacaaagccctactcgccaaacgcgacgatttccaagcgcggatcgatacctggcaccagactcacgcaggccaggcgcacgacccggtggcttacaaagccttcctgcaagacattggatacctgctgccagaagccgcggatttccaggccacgacccaaaacgtcgatgacgagatcgcccgcatggccggcccgcagctggtggtgccggtgatgaacgcgcgcttcgccctcaacgcctcgaatgcgcgttggggctcgctgtatgacgcgctgtatggcaccgacgccatcagcgaagccgacggcgccgagaagggccagggctacaacaaggtccgtggcgacaaggtgatcgccttcgcccgcgccttcctcgatgaggccgccccgcttagcgctggcagccatgtggagtcgaccggctacaagatcgttgatggcacgctgatcgtcagcctcaagggcggcagcaacagcggcctgcgcgacgatgcccagttgatcggctaccagggccctgcggccgagccgattgcgatcctgctgaaacacaacggcctgcacttcgaaatccagatcgacgccagcaccccggtcggccagaccgacgccgccggcgtcaaagacgtgctggtggaagccgcgctgaccaccatcatggactgcgaagactccgtcgctgccgtggatgccgacgacaaagtggtgatctaccgcaattggctcggcctgatgaagggcgacctggccgaagaagtggccaagggcggcaagaccttcacccgcaccatgaacgccgaccgcgtgtacaccggcgtaaatggccaggatgtgacgctgcatggccgttcgctgctgttcgtgcgcaacgtgggtcatctgatgaccatcgacgcgatcctcgacaaagacggcaacgaagtgcccgaaggcattctcgacgggctgatcaccagcctggccgcgatccacagcctcaacggcaacagcagccgcaagaacagccgcaccggttccgtgtacatcgtgaaaccgaagatgcacggcccggaagaagccgcgttcaccaacgagctgttcggtcgcatcgaagacgtgctgaagctgccgcgcaataccctgaaagtcgggatcatggacgaggaacgccgcaccacggtcaacctcaaggcctgcatcaaggccgccagcgagcgcgtggtgtttatcaacaccggtttcctcgaccgtaccggcgacgagatccacacctccatggaagccggcgcgatggtgcgcaaggcggcaatgaaggcggaaaaatggatcggcgcgtatgaaaactggaacgtcgatatcggcttgagcaccggcctgcaaggccgtgcgcagatcggtaaaggcatgtgggcgatgcccgacctgatggcggcgatgctcgaacagaaaatcgcccatccactggccggcgccaacaccgcgtgggtaccgtcgcctacggcggctgcgctgcacgtgttgcactaccacaaggtcgacgtattcgcccgccaggccgaattggccaagcgcgaacgcgcgtcggtggacgacatcctgaccattcccctggccagcaacactgattggtctgacgaagagatccgcaacgagctggacaacaacgcccaaggcatcctgggctatgtggtgcgctggatcgaccagggcgtcggctgttcgaaagtgccggacatcaacgatgtgggcctgatggaagaccgcgccaccctgcgtatctccagccagcacatcgccaactggctgcgccacggcatcgtcaacgaagcccaggtgatggaaagcctcaagcgcatggcgccggtggtagaccgtcagaatgccggggacaaactgtatcgcccactggcaccggacttcgacagcaacatcgcgttccaggcagcggtggagttggtgattgaagggaccaagcagccaaacgggtacaccgagccggtgctgcaccgtcggcgtcgggagttcaaggctaaaaacggcctgtaaatgaaaaagccctgatcgagagatcggggctttttctttggggttgtggtggctgaactggcgctatcgggggcaagccccctcccacaactgataggcggcgcagcacacaagtgggagggggcttgcccccgatgaggccgttatagacaccgcagaatcaggacgccatccccaactcgcgcttgaccatcttcgccaacttcacgctatcaatcggcttgagcaagaagtccaccacgctcaaatgcatcgcatcgatcacgtccggcgcttcggcgtcccccgacatgatgatgatcggcagcgctgcccgggtggattcacgcacttgtcggatcagttccaggccattgctgggcgccatgcgcaggtcggtgatcagcaaaccgatggagctgctggacttcaacaaatcccacgccgcctcaccactgtcggcggtcatgcagcgaatgccgtccagccccaggatttccgccagcagttcacgcgcgtccttgtcatcgtcaacaatcaacacgcgttgtggcggtaaatcaggctccagcatcacggcgctcagcgcctcgcgctcggcatcgctcaaaatatcgtggtcggacatacggttctcagcaattctcatctagctcccagcacactcgtcagacatctgcggaagggcgatcaatgtgcacttcgtcggaaagtttgactagtgggtgttctacggggtttggacgatagtcatgtaaggtttttccctagttctatggtgttttcagcgacctagacttacgtccaatgggcacccgctgcgcaggagtcgaccatgagggacgataacgacaaaaaaactgcggtcactgttatgagtaaagctgatgcctacgcccaggcggggaaaactgctgtactgcaaaatatccacggcaccctgcaattcctgcaacgtttcccgccgttcaaccagatggaaaacgcccacctggcgtttttggtggaacagtgccagttacgcttctacagccccggcgacagcatcctcaaaccgtcgggcggcccggtagagcatttttatatcgtcaagcagggccgcgtcgtgggcgagcggccggacagcgccgaaaccacctttgaaatcacgacgggcgaatgcttccccctggcagccctgctcggtgaacgggccacccgcaccgagcacaaggccgccgaagacaccttctgcctgcaactgaacaaaccggcgtttatcaagctgttcgcgctgtccagcccgtttcgcgactttgccctgcgcggcgtcagcagcctgttggaccaggtcaaccagcaagtgcagcaaaaggcggtggaaacccttggcactcaatactccctgaacactcgcctgggtgaattggccatgcgccacccggtaacgtgcagcccaaccacgccgctgcgcgaggccgtcacgctgatgcatgagcagcaggtgggcagcatcgtgatcgtcgatgaacacaaagcgcccctggggattttcaccctgcgtgacctgcgccaggtagtggccgatggcaccagcgatttcagccgggccattgaaggccatatgacccaggcgccgttcttcctgaccccggaccacagcgccttcgacgccgctatcgccatgaccgaacggcatatcgcccatgtgtgtctggtcaaggagcagcgcctgtgcggcgtggtgtccgagcgcgacctgttttccctgcaacgcgtggacctggtgcacctggcgcgcaccatccgcaacgcaccgcgggtagacaacctggtggcgattcgcggtgaaatcggtcaattggtggagcgcatgctggcccatggcgcgtcgtccacccagatcacccacattattaccctgctcaacgaccacaccgtgtgccgggtgatcgaactgaccctggccgaaaaaggcgaccccggtgtgccgttcagctggctgtgcttcggcagcgaaggccgccgcgaacagacgctgtacaccgaccaggacaacggcatcctgttcgatgccaaggacgccgccgaagcggccgagatacgtggtcggctgctgccactggcgcagcaaatcaatcagagcctggcgctctgtgggttcagcctgtgcaagggcaatatcatggccggcaacccggagttgtgcctgtcgcgagccgaatgggcgcggcgttttgcagcgtttatccgcgaggccacgccggagaatctgctgggttccagcatctatttcgacctgcgtgtggtgtggggcgatgaacgtggctgcgagcaactgcgccagggcattctggatcaggtcgcggacaaccggttgttccaacgcatgctggccgagaacgcattgcgccagcgcccgcctgtaggacgtttccgcgagtttgtgctgacccgtaaagggggcgagaaagccaccctcgacctcaaggtgcagggccttacgccgtttgtggacggcgcgcgcctactggccctggccaatggcatccacgccaacaacaccctggagcgcctgcgccaactggtggtcaaggaagtaatcgagcgcctggacggcgccgcctatgaagaggcctaccactttatccagcaaacccgcatgcagcagcaccagttgcagacccgcgagaaccagccgtattccaaccgtgtcgaccccgacagcctcaaccatctggaccggcgcatcctgcgggaatccctgcgccaggcccaacgcctgcaaagcagcctgacgttgcggtatcagctgtgagcttgttcaactggctgcgtacgaaaaagccggggctcgacagctcgcagcaacagcgcctggagcaactgtgcaagccttcgccgctaggcaaccaacctttgcccagccagcgctgggtcgtggtggacctggaaaccagcggcctgaacctcaatcgcgaccaggtgctgtccatcggcgcggtggtgatcgaggacggtgcggtggatttctcccagatgttcgaacgcaccctgcaacgcgccgagaccagactcagccccagcgtgctgatccacggcctcggccccagtgccattgccgccggcagcgacccggtggaggcgctgttggacttcatgggatttgtcggcgacagcccgttgctggcgttccatgcgccgttcgatcaacacatgctgtgccgggcgctcaaggacagcctgggttaccgcctggcccacccgttcctggacgtggccgacatcgcccctttgctgtgccccgacgcgcatatccgcgaggccgggctggacgactggatcaaccatttcaacctgcacgtgggcgaacgccatcatgccagcgccgatgccctggccacggcggagctgatgctcatcctgttcagccgcgcacgggcgcaacacatcgacacgccacaggcgctgcaagagcgcttgagccaatggaaacggcgtcaacacgcgcactctttttaacaccgctggtgggcgggcttactgtggcgagcgggcttgccccgcgttgggctgcgnnnnnnnnnnnnnnnnnnnnnnnnnnnnnnnnnnnnnnnnnnnnnnnnnnnnnnnnnnnnnnnnnncgcagcccaacgcggggcaagcccgctcgccacagaaagcccgttcgccacaagagcatccccccttcgaaccgacagacgccaattgcgtacactcgacggctctgacacaatcgcgaataattctcgttagtttaaacatcgcgtttaccaggtgatgccttgtcgtcgatccagaacccacgcagtgagcttgttggtgcgttgtatcgcgaccatcgtggctggctgttggcttggcttcgacgcaacgtggcctgcccaagccgcgccgaagacctgagccaggacaccttcatgcgcctgctcggccgtgatgagttgcgcgccccccgtgaaccccgtgcgtttctggtggcgatcgccaagggcttgttgttcgactacttccgccgcgccgccctggaacagacctacctcaccgaactgatgctgatcccggagagcgaacacccctcgccggaagaacagcaactgatcctcgaagacctcaaggccatcgaccgcctgctcggcaaactgtcgagcaaggcccgcgccgccttcctctataaccgcctcgacggcctgggccacgcggaaatcgcccagcgcctcggggtctcggtgccgcgggtgcgccagtacctggcccagggcattcgccagtgctacatcgcactgtacggcgagccgcagtgacggtgatcagttccaaaccggtctcggcccgcgtgctggatgccgcgattgcctggcagctgtcccttgattcaggtgacggcagcgccattgagcgcgaagagttcgataaatggctggccagcgatgaagagcacgcccgcgcgtggcgccaactgggcatgctcgaccagcggttcagcgtggcctcgggcccggcacgcgtagcgttgttgcaatcgcgcgacagcattcgccaacgcgttcgcaagctgggcagtgggctggcgagcattgcactggtgatcggcctggcgttgtttgccggcgagcgctatgtgccgatccactattggctggccgaccaacgcaccgccacgggtgaacagcgcacgctgaagctggcagacggtacggtgatcaacctcaatacccacagcgccatcgacgtgcgttttgatgaaaagcgccggctgatcgtgttgcaggaaggcgagatcctggtcgagaccggccataacgatgcgcgcccgttctatgtgcaaacccgcgacggcagcctgcgggcgctgggtacgcggtttatcgtcaagcgcgaaaacgacgccacgcgcttgagcgtgctgcaatcggcggtggctgcccagcccgaggcgctgcaccaggagcagattttcaaggaaggccagcaagtgctgatgcgcagcgacggcctcggcccactgctggccgttacccccgccaccgacgcctggacccgcggcatgctggtggtggacaacgcccgcctgggcgatgtgatcgaggaattgagccgctaccgcaccggttacctgggtgtggataaaaacgtggccgatttgcgcatcactggcagcttcccattgcgcgacaccacgctggcgcttaatgcgctgctgccgaccctgccggtgcagatcgagcagcacacgccgtggtgggtgacggttaagggcaagccttagttttagcggtgccttggctatcgctttcgcaggcaagccagctcccacacttgaccgcgttctacctgaaaaaacacggtcgaatgtgggagccgggcttgcccgcgaagaggcccgcaagcacaccttacgccccggggaaaaatattttcagcctgctctatcactttctgattctcgttcggcacataggcaattgcgaattacttccattcaggagccgccctatgtcccgcacgctagacaccttgttgcgccccagcctgttagccgtggccattgctctcagcgccccgctggtcagccctttgctgatcgccgccgagcaggcgtccagcgtgcgcgcctacaacttgccggcggcgccactggcgaccaccctcaaccagatcgccagccagggcggcctggcactgaccctcagcccggcgctggcatcgggcaagacctcggcgccggtccagggccagttcgacgcacccggtgcgctgcgtgaggcgttgcgtgggacgggcctgcagttggagcaaagcagtgcgggcacttacaccctggtgccggttccggaaggcgtcgtagcgttgccgaccaccaatatcaccggccaggacagctatgaaagcgcctggggcccggtcgacggttacctggccaagcgcaccgccgccggcaccaagactgacaccgcgttggtcgaggcgccgcgctcgatctcggttgcaacgcgccagcagatgcaggaccgcaacgtgcagaacctggatgacgcggttaaatacatgcccggcatcgtctccgccagctacggcagcgacacccgctacgactggatgcgtgtgcgcggcttcgaaccgacccagttcctcgacggcctgccgctgccacgcggtgtgtacgccaacccgaaagccgaaacctggaacctcgaccgcctcgccctgctgcgcggcccggcctcgtcgatctacggccagaccccaccgggcggcctgctggacatggtcagccgccgccccagtgccgagtcgagcaatgccgtacaggtgcaatacggcagcgacaactaccgccagatcaacttcgccagcaccggcaagatcgatgacgaaggccggttcctctatggcctcagcggcgtggtacgggatgccggcacccaggtcgatcatatcgacaacaagcgctacaaccttgcgccgagcctgacctggaacatcgacccggacaccaagctgaccttcctttcgcagttcacccgcgacgatacgggcaccaccagccagttcatgccgatccagggcaccaagatcaaatcgccgctgggcgaggtgtcccaccacaagaacctgggcgacccggactacgagttctacgaccgtacctactacgcgctgggctatgcgttcgagcatcgcttcaacgacatctggcagttcaagcagaacctgcgctacaccaagtccgagctggacttccaacagctgaccgtgggttcttatgccttctccccagcggatgcggcgggcaatatcagccggtcgaccaccaacgtgaatgaaagcatcggccagttcgcgctggacaacaacttccaggcggacttcgccaccggcgacatcacccacaccttgctgctcggcctggatcaccagcgcaccgataccacctatcgcgcgatctacggtacagcgtcgaatatcaacatcttcaacccggtcaatacccaaccgactgtgcgccctaccggcgtccgccctttttacgactacaaccagaagaccgtgcaaaccggcctctacgcgcaggaccagatggccctggaccaatggcgcctggccgtgggtgggcgtgaggactgggtgcatcagggcaccacctatttcaacgataacgatgcgaccaacaccgaccgcatcaagcacttcagtggcaacgcggcgctgagctatgtgttcgattcgggcttcgtgccgtacttgtcctacgccgaatccttccaaccggcgagcaacgccgacaccaatgccaccaagaccttcaagccgaccgaaggcaagcagtgggaaatgggcgtcaagtaccagccgcccggctccaacacgctgctgagtgcggcggtctacgacctgacccagaagaatgtgcaggtgaccaccctcggcgccggcggccagcaaatcaacagccagaccggcgaagtgaaggtcaagggcctggagctggaagccgtgtctgatgtgaccgagaacctcaaggtcatcgccgcctacaccctggcgaaatccgaggtgcaaaaaggcatctacaaaggcaaccgcctgaccttgatgccgaaccagcaagcctccctgtggaccgactacacctggcacaccggcctgctcgacggcttcggcatcggctttggcgcccgctacaccggcaacacctacggcgaccaggccaacacctggctgggcaaggccaacgcctacaccgtattcgacggcgcggtgcactacgacctcggccgcctggacaacagcctcaagggcgcatcggtcaagttgaacgccaccaacctgttcaacaaggactacctgtccacctgtgacggcaactactgctacttcggcgaccaacgcagcgtcgtcgccagcgccacctaccagtggtaatcagctgagttaaccgccgggccgcccaaggggcggctttggtgtgtctgaaggttgaaaacatgaaaagccaaaccatccgccgctggtccttcatccacacctggaccagcctgatctgcacggtattcctgctgctgctcgccctcaccggcctgccgctggtgtttcaccacgagatcgaccacctgctgggcaacgagccggaactggcgcagatgcccgccgatacgccgcagctcaacctcgagcagcttgtagccaaagcgcaggcccatcgccccggcgacgccatgcagtacctggcctgggacgaagacgacaagaacggtgtgatcgcaatcatggccgccaccgccggcaccgaacccaactcgtcgcacaccttcatgctcgacgcgcgcaccggcgaagccatggaaaccccggcggccaacggcggattcacgctgttcctgctgcgcttgcatgtggatatgttcgctggcctgccgggcaagttgctgctggcgttcatgggggttctgtttgtgctggcgatcatctccggcacggtgctgtacctgccgtttatgcgccgcctgaaattcgccactgtgcgtcaggacaaatccacccgcctgcgctggctcgacctgcacaacctgatcggcgtggtcaccctgacctgggcgctggtggtgggcgtgaccggggtaatcagcgcctgcgccgacctgatcatcgccgcctggcgccaggacagcctcagcgccatgatcgaaccctacaaaaacgccccacccctgacccaacgcgcaccggccaccgagctgttggcgattgccgccaaggccgcacccggcatggcgccggacttcatcgccttccccggcacacgcttttccagcgagcaccattacgcggtgttcatgaaaggtagcacccacctcacctcgcatttgctcacgccggtactgatcgacgccagcaccctggccgtcaccgccatcgccgaacgcccgtggtacatggacgccatgggcatgtcccaaccgctgcattttggcgattacggcggcatgccgatgaagatcctgtgggcggcgctggatgtgctgaccatcatcgtgctggtgagcgggatttacctgtggatcgtaaggcgccgagcatgaagccacgtcagtcgagtttctggaaggtctttgggattccgctggggatcggcctgctcagcgccgccgggttgtttgcagcgctgctcggcgatgggctgtgggattcgctcagttggctcgggttgggcattcccgctgcaattggcacttgggccttgctcaaacggtgagatagattagcgctgcccaatcagaggaatgcccatgtccgctcccagcatgaccttgttccacaaccccgcttcaccgtttgttcgtaaggttcgcgtgctgctggctgaaaccggccagcaggaccgcgtcgccctgcacggctgcatgccgaccccggtcaacccggatgcgcaggtggtgcaaggcaaccccgtgggcaagatcccggccctgcgcctggccgatggcacggtgctgcacgacagccgggtaatcctcgattacttcgaccaccaacacgtcggcaacccgctgatcccccgcgacggctcggcccgctggcgccgcctgaccctggcctcgatggccgacggcatcatggatgccgccgtgctggtgcgctacgaaaccgccctgcgcccggcagaaaaacactgggaccaatggctcgacgaacagcgcaacaagatccgtcgcaccctcgccgagctggaagccgacgcgattgccgagttggccagccatttcgatatcgccgccatcagcgtggcttgcgccctgggttacctcgacttccgccacccggatatgcaatggcgcctggacaacccgcagcttgccgcttggtacgcggaggtcagccagcgcccttcgatgctggaaacccagccaccgctttgacagtcactgtagtccggtgtgggagggggcttgcccccgatggcggtgggtcagctacaggtgaagtaacagacacactgcaatcgggggcaagccccctcccacactggccggtggcaaggttgagatagtcgatgatcctcgccttcatttgctgatcttcccgcaacccgatcattgcaccgcctccaggtcaaacatcaacggctcggccgccttgcgtttgcccacgccataccagtccaactttcgcgtcagtaccatcaccgtgcccagcaggccgaacagcagcaacgagcccatcagcaacgcgtagtcctcggcactcaacaacccgtacagcaagccatacaacgccgccagccccgccgaaaagcccaggccatgggcgacgctgcgcagcacgtggcacacatagaagccgatcaacaacacgcacgcactggccgagatcaggtaggccagggcgaagcctatgtgctcggacaacgacagcaacagcaggtagaagaacgccagcgcaaagcccaccaacgcgtactgcaccgggtgcaccgccaggctcttgagcacttcgaacaggaagaaaccggcaaaagtaagggcgataaacagcagcgcgtatttgatcgcacggtcgctcttgaggtactggtccaccgggtcgatgaagttcacaccgaagctgcggttgttgaagtcattgcagccctggccgtccaggcaggtttgcagggcctgttcgaggttggtggagaaaaatgaggtctgccagttggcggtaaaccccttgtcggtgacctcacgctgcaccggcaggaagttgccgataaagctggggtgcggccagttggaggcgagtgacacctggctggtcttgcccaccggcaccacttgcaattgttcggtgccttgcaggcgcaggtcgaaggcaaagtccacgacagagggctttttgctgtcctgctccggcagcgccacgtgcacgccttcacccagccagtccacctgggagcccggttcgaactccagctgctggctgcccagctccaacttcaacgcattctcgatgccgcgaatatcgctgatgcccaccgccagaaacgccggatcaaagcggtaatcggcaaagtcctcggtgatgcccagctgcgcaggcaattcgaagcgcccgctgatgcggttgtcggcatggaacagccgcgcctggtagatgccgcgtgaacgcagttcggtctgcaccttgccgtcgagttcaaaacggtccggcaggaaatacagacgaccacgctcttcacgggtgacttcgtagcgtttgttgagcttttcattgagcttccactcgcggacggtcttgcgatacggcaccaccatcaccgggccggtgaggcgctgggcgtagctggagctgcgggcgatgtccatcaggacgccgtcgcgcagttgctggcggtcgctgatgatgccgttgatcatcagcaacggaatcagcaacagcaggatcagcagcgcaatcgcgccaagtttgaaaagcaggctgcggttcatgggtctctccctgttttgatgggggagagtctgggcagcctgtgtgggagatttatgtgggcaatgtggagactgtatggagatgcagcaccacttgcacgccaccttgcacattaccgatctgcaacgcgccgccgtgcagcttcatcacttcctcgacaaagttgaggcccaggccggtgcttttgcgcccgctggccgggcgtggcagcgaatagaaccgttcgctcaggcgcggcagggcgtagtcgggaatcggcgcggcctggttgaacaggctcacctgcacgtcgttgtgccgggtctgcgcgctgaatttcaaggtgccgccaggcggtgtgaaatccagggcgttatccagcaggttgcccagggcctggcgcagcaggaagggttcgccgtacaccttcacatccgccgcaatcgtctgttcaacgtgcaatccggaaccttcgatccgcgcacattgcgccttgagcacatcatcgaccatggctgccagcaggatgctcacctgctcttccaggccctggcgttgctcgacctgcgccaggttcagcagacgttcgatcaactgctgcaggcgcgcactttcactgtcgatattgccgacgaagcgctgctgttgctcacgggtcatatcgccctgcaacagctctgccgcaccgcgtatcgcggccagcgggctcttcaattcgtgggtcagggtgtgcacgtagtgttcgacgtaggccttgccttccagttgcgtgcgcatgtgttcgacggcggtggacagctgtttgagttcgccgccacggtaatgcggcaactcggcgcgccggccctcgctgaccgcctcggcgtaggccgtcaagcgacgcagcgcaacgctcagccaccacgacagcagcgcgccgagcaacaggccgagaaccaccaggcccgcgccgtaccacagcaggcgccgctcggtgcggtcgacgtagggctgcaacgagctgttcggcttggccacggtgaccacgccgatgatctggccgttgtcacggatcggtgcgcccacgtgcatcaccgaggaagtggggtcatccagctcgctgcgtgtggagcgggcaccgtactcgccgcgcagggtcaggtacacatcgttccacttggaataatcctgccccaccgcttcgcccgtggagtcgagcagcacggtgcccttggcatcagtcacgtagatgcggtgattgacctggttcttcggcagcccccagatggtcgcgcccggctggcgattgccgtaggccttgagcagttcaggccagtggctttggccgagggtgccgttcttcacatcgtcgcgcaggatttcggccagcaggttggcggtgtccaccagggtttcttcggtggactggcgcacgccggggcgaatttccttcatcacggtgctgagcacgaagtagccggtcaggccgataaacagcgcgtacaccaggaaaatccgcagccccaggcgcatcagctgttgcctgggctgtagctgtagccaagaccgcgatgggtctggatcggctcggcgtcggcagccacattgcgtaacttgctgcgcaggcttttgatatggctgtcgatattgcgctcgtaaccggcatccgccgcgacgccgaccgcgtccaacagctgctcgcggctgaatacgcgctcgggttgttccaacaggctttgcaataggcggaattcgtgacgtgtgaggctcaacggctgaccgcgatacatgatctgcatgcgctccaggtctacctggaataccgccggcgcagcccctggaccaatccgcttgaggatcgccctgacccgcgccgtcacttcccgtgggctgaacggcttgaccacataatcgtcggcgccgatttccagccccaccacccggtcgatctcgccatcccgcgcgctgaggaacatcaccggcacttcgctgaaccggcgcagttgcttgcaggtttcaaacccggtgatgtccggcaggccaatgtcgaggatgatcagatcggccggcgtctggcgttgatgctccagcgcagcctggccgagtgtcagccaggtggtggtgaagccctcgccttgcagggcgaatatcagcgtgtcggctatcgccgcttcgtcttcgacaatcaggatgtggggcatggtggtccgtcagcagtccggtttgtcagcagtgtaacgacgcgccgggttgaccgcagcgccgaactcgcgcagagccttggcgccgatcagcagcgggtagttgaagctgctgcggtcggtgaggttgacctcgacggtgcgcttgacgtcgcccaggcacatttccaggtcgatcaccgggcgcttggccacggtggcttcgtccttgtcctcgtcctcgtcggcgcggctcttgatcttgctgatgcgcaagactttgtgttcgtagaccttattggacgcgtccttgccgccgaggcggaaacgcacccaatcgtcaccgtcacgggtgaaggtttggatgtcacgggccgacagcgaggcggtgagcgcgccggtgtccatcttggccttgaaggtttcgccgatctccggcagctggatgtattcgtagcgaccgtagagggtcggttcggcggccatgaccggcagggcagccagggccaaagaggcaaggagcagtttcacgaagtgatttcctcggaaagaagtaggcggattctagaccgcaaaagcgccggttagttagctcatcccaccatacccggcacattgtgaaacattcgtacggtgatttgcgatttggcctctagactcaccttgcttatgatggcccgcccacaagattccaagagttacttatgcgccgcctgctcaccggctgtctcgtcaccctgctgctcttgctcaacaccctcgtgctgttcggcccgttgatggtgtttgccctgctcaagctggtagccccggggcgcttgcgtgactacatgtcatgggcggtaatgtggatcgccgagacctgggccgagatcgacaagctgattttctcgctgtgcatcccgacccagtgggacattcgcggcggcggcgatctgcggggtgacaccagttacctggtgatcagcaaccaccagtcctgggtggatatcccggccttgatccaggccctcaaccgccgtacgccgttcttcaaattcttcctgaaaaaagagctgatctgggtgcccttcctgggcctggcctggtgggcgctggattacccgttcatgaagcgctacaccaaggcgttcctggccaagcatcccgaactggcggggcaggatttgaagatcaccaaagaggcctgcgagctgttcaagcgccagccagtgacggtggtcaattatctggaaggcacgcggttcagcgacgccaagcgcaggcagcagggttcacccttcaaccgcttgctcaagcccaaggcgggcggcgtggcgtttgtgctggcggcgatgggcgagcaactggatgcggtgctggacgtgacggtggtgtatccgcagcaaaagattccggggttctgggctttgatcagcggttcggtaccgaaggtgatcattgatatccgcacccgcgaactggacccggcgctatggcaaggggactacgagaacgatccggcatttcgccagactgtccagagctgggtgaaccagctctggcaggagaaggatcagcgcattcagctattgctcaagtaatacggcatggcgtcgttcaggtgccccaccatcccgataaaatgctttggcgccttcgagcgcagctttgagactggcaatcaagtcagcatcagaggtgtttaccgcgccatcgagcttcaggaacgctttcgctaccgcagccaggcgttcaagatcggccggctcaaggcctttttcggaagcttcggctttgaggaaatccctcatgctggaaagcatctcgtctccgcccaaggagttggtagtgctatcagccaccgctttcttgtaagcggcaacgaatttctccgactcctcgttcgtcggcgcttttatgcccgcgaacaatgcattggcacccagcggaaaattcgatttttgctcagattgagtgtgttccacaaaacgtcgaagatccgaaagcagttgcttgagttgcaagtccggcttcttgctgctccctgccacctcccaggcattgcgtatatcctggatcaacccggacggcagggtgaggccttgccgggccacacgaaccgctgcctgggcctgctcgaaagaaataccggaagacattgggaactgtgaattaatctgagtcattggagcaccatttcggtcagttgaagagtctctcaaataccgctcttagcgattgatgagagagttcttattaggtggccactcaacctcccacagttcccagcgctatatcacaggatattacgcagtcagtcgtccttccaacacagacgaagacgataccaatagaggaatacacgagcacagtgaccgcgcatcctcgtaagcccccccgcactggatgagcccgccacggagaggcaaaaaggcatgctgaacatccgtcagttgccagtgccccaggccgaggccaatttacccagcaatgactggttcgcaccctggccacccaagtattgcaggatcaccggcgcaaactggccgaccatgccactgtccatgcccagggcgctgaacgcagtgttcaggtcgttggtgttcttcacattgcccagcaggccgtcgaggccgctggtcttgctaccgccagcctggccgagcatcccgctcaaggccccgaggctgcccaacgcattattgcccgacagttggtcgaggcccggcacactattgcccagttgcgaatagtcgttgccgctcaatttgttcttggccaggcccagcatggcgcccgtaccgccgaccgcttgctcgggggtgatgttcagttgcgaggtcagggcgctcaacaggccggccgtctcggacgacggtgcagcagcggctgccttgttgttaccaccctgcatgccggaaatggcattggccgcgtcgccaaggctgaaccctgcggcgagcaccgggccggctgccagggtcatcaggcaggaaagggcgaaaccgcgtgaaatcttcatcgaaacaacctctgggtgtaggagctaaaagcaggcgtttgactgacagtccggaacgattgttcccacaccaaggttagttcagatttttctgcatccgaatcgcctcggcccgcgtatagcctgcatacgccactcggagttggatggaatgaatgcccaggctgaactaccctccgcttaccgcgtgcagtcccgtcaccctcgaacgagggtctggagaagctctattagcgccgatgatgctgacccattgcgccctttgctggcgcaatgtgccttaggtaaccgccaggcattcgaaaccctctaccgcagcgtttcgccgcgcctgcacggtgtagccctgcgtttcatgggccgccgggacctggccgaagaggtgttgcaggaagccttcgtgcgtatctggtacaacgcctcccgctacgaggcgcacctgtctgcgccgatgacctggatggtgaatatcacccgcaacctggccatcgatcaattgcgcaagcaccgtgaacagccgctggcagagggtcagcaagacgccttgctcgatgacgcccccagtgctcacgaccaactcgacaacgaacgccaagcccgcgccttgaaccgttgcctggacaccctcgacggcatgcaacgccagtcgatcagcgtggcttacttccagggcctgtcgtgctcggaattggccgaacacttggccgcgcccctgggctcggtcaaatcctggattcgtcgcggcatggaacgcctgcgcaggtgccttgaatcatgaactaccagaccaccgccctgcgccgcgccctcgccgccgactacgccgtcgggctgatgcccgccaccgcgcgccggcgttttgatgcgctgcttctggaggatgccgcactgcgcgtggaactcggccattggcaggacgcgctcgccagcctgaccggtgccttgcccgagcgagcggtgccggcgcatgtctgggaaggcatcaaggcacgcatagagccgcaggtgctgcatgtgccggcgaaaaaaccgttctggatgaacctgcgcctgcaggcggcggcgtttggcatcgtcattgccgtgctggtgggcgtgctctaccagcgcgacctgggaatggaatacaacgccacgctggtcgccgccaaccagcaaccggcgctgcagatcaaggcgtttgccgaccacctacaagtcgagccgctgacattggccgctcttgagccggcacgcgccctggaactgtgggccattcctgccgggggcaagccgatatcactgggcctggtgccagtggcgggcaaaggtcgaatcgcgttgaacaaaacgcagcaggcgctgctgaaaacaccgctgaccctcgccgtcagcctggagccacaagggggctcgccgacaggtcaaccgaccgggccggtgttgtatcagggtcaattggcatcactttgaggtgagatggcgccaggaacccggcgcgcagactgttagatctgtgggagggcttgcccctcccacatctggaacgcggtatcccggggatttaagccgcgctgaagagtttgtgcggatcaatcacaaacttcttcggcacacccgcatcgaactcgccatacccacgcggcgcatcatccaggctgatcacctgcacacccacgatttcggcaatgttgatacggtcccacatgatcgcctgcatcagctggcggttgtacttcatcaccggcgtttgcccggtgtggaagctgtgggattttgcccaacccaggccaaagcgaatgctcaggctgcccatttttgcggcggcgtccacggcacccggatcttcggtgacgtacaggccagggataccgatcttgcccgccacgcgcactacgcccatcagcgagttgagtacggtggccggcgcttccgccttgaccccttcatgaccatggccacgggcttcaaagcccacggcatcgacggcgcagtccacttccggctcgcccagcagtgcggcgatctgttcgtgcagcggggtgtccttggacaggtcggcaatctcgaagccctgggccttggcgtgggccaggcggaccgggttgacgtcgccgataatcaccacggcagcgcccagcaagcgggcggaagcggcagccgccaggcccacaggaccggcaccggcgatgtagaccgtactgcctgggccaacgccggcagtgacggcgccgtggtagccggtcgggagaatgtcggagaggcaggtcaggtcgcggattttttccatggccttgtcgcgatccggcagtttgagcaggttgaagtcggcgtacggcaccagtacgtattcggcctggccgccggtccagtcacccatgtcgacatagccgtaggcgccaccggcacgggccgggttgacggtcaggcacacgccagtgtgttgctctttgcatgagcggcagcggccgcaggctacgttgaacggtacggaaaccaggtcgccgattttcaggttctcgacgtcgctgcccttctcgatcacttcaccggtaatttcatgaccgagcaccaggccggtctgggcagtggtacggccacgcaccatgtgttggtcggagccgcagatgttggtggagaccacgcgcaggatgacgccgtgctcgatcttcctgccacgggggtcctgcattttgggatagtcgattttctgtacttcgaccttgccgttgccgagatacacgacaccacgattaccagacatgctttcacctcgctgttgtttttatggaactgcgttgcccgttgggtgggcagcgcgtttaagtgctcgggtacagatgctgttcttgcgttgtttgtgagggcctcatcgggggcaagccccctcccacattcgaccgcattccaaaggtgggagggggcttgcccccgatagcgtcagtcagagcaccaccgtccgattggcgttcaaaaacacccgccgctcaatgtgataccccaccgcccgggccaacgtcagcccttcgatatcccgccccttggcaatcaagtcctcgggatagtggctgtgatccaccacctccacgccctgggcgatgatcgggccttcgtccaggtcgttgttgatgtaatgcgccgtggcgcctaccagcttcacgcccttgttgtacgcctggtgatacggcttggcgcccttgaaccccggcaacaacgagtggtgaatattgatggccttgccatccagcttgcggcacagctccggcgacagcacttgcatgtagcgcgcaagaatcaccaattcggcgccggtgtcttccaccacttgccacacctgacgctcctgggacggtttatcgttggggtcgagggggaaatggtagtagggaatctggtgccagtcggccaacggtttcagatcggggtgattggacaccaccgcgaccacgtccatcggcagctggccgatgcgctggcggtacagcaggtcgttgaggcagtgatcggccttggagaccatgatcaccacttttggccggtagttcggcgccgtcagctcgaagatcatgccgaaggcttcaccccgcgtggccaggccatcgcggaacgcctgctcgtcaaaaccgtcgggctggcggaattccacgcggataaagaaccggcccgaaagccgatcatcgaacgagtgatgctcagtgacgtagcaaccctgttcgaacaggtagcgggtgaccgcgtccaccgtgccgagcacgctggggcagtcggcggtcaaaatccatgtatcaggtgcgcggctcatggggtattcctcaggcttggacgctcaggccgaattcggcggatgcatcctgcagccacaaccaccagtaatccgagaagctgcgacgaatcaccagctcccaagtgtcttcagccgtgtggcggatcaccagttgcgacttggcgaacaccgtgcccaccgccttgcccaccgggaagttgttggggtgcacgtcgtagctggtggacttcatcagcacatcgcgcacgttcgggccgctgagttcgaggatctgctggccgccgctgacattgacgacctggatatgcaggtcgcccagggcggcgcgcaggttttgctcggcggcgaattcttcaccgctcggcacgatcagcaaccactcatccgggccgagccattgcaggctggtttcgcccttgacgatcacttgcagggctcccggcaactcgatgccgacagctttgtgcacgccggcggcgaaggctgcgtcatggccgtcgccacgaatagtcaggtggcccaggagtttcttttcacgcacggtcacaccggcgttcttgcggcccttgccgaccaggctggcgaggtcggcatggtgcagcgacgactcggccttggcgccggaggtggggcgttgttggtaaacattggctgctgtcataaagcacctgttctaaatgctgtggtgtctgttctggcctcatcgggggcaagccccctcccacaggggaatgcatttcaacatgtgggagggggcttgcccccgatacaggcgactcgatccatcagatgttctggcgatcgcctttcgggtcgaagaacaccgaagaaacaatctccgcctcgatcacgctgccatcggcctgcggtgagaacacccgctcgccgatgcgcttcaagccgcccttcaccaccgccatcgcgaacgaatagccgagggagttgtgggcatagcttgaggtgacgtgaccgaccatcttcatcgggatcgactgcttcggatcaaacaccagttgcgcgccttccggcagccacaccttcggatcgaccggcttcaagcccaccagttgcttacgctcttcacgcacgcagtcttcacggttcatgccgcgccagccgatccacgagaacggtttggtgcggcccacacaccagcccatgttcaggtcgtccggggtcatcgagccgtcggtgtcctggccgacaatgatgaagcccttctcggcccgcagcacgtgcatggtctcggtgccgtacggcgtcaggttgtacttcttgccggcgtcgacaattttttccagcacgcccatggcgtagtcggcctgcacgttgatttcgtacgacagctcaccggtaaacgaaatgcggaacacccgcgccggtacgccgcccaccaggccttccttccaggtcatgaacggaaaaccgtccttgtccaggtcgatgtcggtgacttcggccagcagcttgcggctgttggggccagacagcgtcatggtcgcccagtggtcggtgaccgaggtgaagtacaccttgaggtctggccattcggtctgttggtagatttccagccactgcagcacgcgtgccgcgccgccagtggtggtggtcatcaggaagtggttgtcggccaggcaggcagtcacgccgtcgtcgaagaccatgccgtcttccttgcacatcaggccgtagcgcgccttgcccacgtcgagcttggtccaggcgttggtgtagatgcggttgaggaactcccgcgcgtcggggccctggatgtcgatcttgccgagggtggacgcgtccagcaggccgacgctgtcgcgtacggccaggcattcgcgcttgactgcggcgtgcaggtcttcaccgttgcgtgggaagtaccacgggcgtttccactggccgacatcttcaaactcggcgccgttcttcacgtgccaggcgtgcagcgcggtgtagcgcaccggctcgaagatgtgcccacagtgacggcccgctaccgcgccaaaggtgaccggcgtgtagttgggacggaacatggtggtgcccatctgcgggatggtcacgttcagcgaacgggcggcaatggccaggccgttgacgttgcccagcttgccctggtcggtaccgaagcccagcgcggtgtagcgcttgacgtgctcgaccgactcgaaaccttcgcgggtcgccagttcgatggcggcggcggtcacgtcgttctgcaggtcgacgaattgcttcggcgctcgtgctgtgggcttgtcgtgtggcacttggtaaatagccaaagtcggctcttccaggcggctcaaggcttttggcaaggtaccttccacgggcgcgaaaccggcttcgctggcagcgcgcacgccgccttcaaaaccatccgccagggagtcgccaaggccgtagacgccgttgatgccaccgacgcacacgcgtttctgcggggcttcgcccggtacaaaaccgaggatatcttcacgccaggtcggcttgccgcccaggtgcgaagccaggtggaccaccgggctgtagccgccggagctggctaccaggtcacactccagccattcacctgggctggtgactttatgcgctttcacatcgatcgcggccacgcgggcggcggtcacgtgcttgctgccacgggcttcgatcacggcgctgccggtgaggatacgaatgcctttggcgcgggcctcttccaccagcgcaccacgtgggttgtggcgcacatcggccaccgccaccactgcaaggcccgcatcgagccagtccagcgcaacgcggtaggcgtggtcgttgttggtcgacagcaccagtttcttgccgggtgccacgccgtagcgacgtacgtaggtggagaccgcaccggccagcatgttgcccggcacgtcgttgttgccgtacaccagcggacgctcgcacgcaccggtcgccagcaccacacgcttggcgcgcacccggtggatacgctggcgtaccacgccaatcggcgcacggtcaccgaggtggtcggtgaggcgttcgtgaatggtcagaaagttatggtcgtggtagccgttgacagtggcacgaggcagcagcaccacgtccggcagcgctttcaattcagcgatgacgctggcaacccattcagccgctggcttgccgtcgaggttttcacgcgaatccagcagcgaaccgccgaactcttcctgctcgtcggcgaggatcacgcgagccccaccgcgggcggcggccagtgcggcagccaggccagcagggccggcgccgacgaccagcacgtcacagtgacggttgaagttgtcgtaggtgtccggatcgttctcggtcggcgagcggccaagaccggcggccttgcgaatgtacttctcgtaagtcatccagaacgattgcgggtacatgaaggttttgtagtagaaccccggcggcatcagcttgccgccgaccttgccgaggatgcccatcacgtcattgttgacgttcggccagccgttggtgctggtggctaccaggccctggtacagcgcctgttgcgtggcgcgcacgttcggaatctgggtggcttcggtggcaccgatctgcagcaccgcgttcggctcttcggcgcccgcagcgaaaatgccgcgaggacgcgagtacttgaagctgcggccgataatgtcgacgccgttggccagcagggcggcggccagtgtgtcgccttcaaagcctttgtaggtctggccgttgaaagtaaacgtcaggactttattacggtcgatccggccaccgttggacaggcgattggtctggctcataccttctctccagaggccttggcggtgaattgtggcttctcaccgatcttgtaggtttcaagaatttcgtaggtcagggtgtcgcgggtcgcgttgaagtactggcggcagccggcggcgtggatccacagctcgtggtgcaggccacgcgggttgtcacggaagaacatgtagtcgccccactcttcatcggtgcaggcattcgggtccagcgggcgcggaatgtgcgcttggccggacgcgtggaattcctcttcggagcgcagttcgccacagtgaggacagaagatatgcaacatagggaatttctcctgttagtgggcgacggccgcagcgccgtgttcgtcgatcaacgcaccgttgtggaaacggtcgatggagaaaggtgctgccaatgggtgcatttcacccttggccaggctggcggcaaacacgttgcccgagcccggcgtggccttgaagccaccggtgccccaaccgcagttgaagaacatgttcggcaccggagtcttggagatgatcgggcaggcatccggcgtggtgtcgacgatgccgccccactggcggttcatgcgcacgcgggacagcaccgggaacatctcgacgatggcctggatggtgtgttcgatcaccgggtacgagccgcgctggccgtagccgttgtagccgtcgataccggcgccgatcaccaggtcgcccttgtcggactggctgatgtagccgtgcacggcgttagacatgatcacgctgtcgataatcggcttgatcggctccgacaccagcgcttgcagcgggtgggattcgatcggcaggcggaaaccggcgagcgaagccatgtgcccggagttaccggcagtgactacaccgacgcgcttggcgccgataaaacccttgttggtttccacgccgatgcacacgccgttttccttgcggaagccgatcacttcggtctgctggatcaagtccacgccgagggcgtcagcggcacgcgcgaagccccaggccacggcatcgtgacgggccacgccgccgcgccgttgcacggtggcgccgagtactggatagcgggtgttcttggagcagtcgaggtacggaatctcgtcggccacttgcttggcgttgagcagttcgccgtccacgccgttgaggcggttggcactcacgcggcgctcggaatcacggatgtcctgcaaggtgtggcacaggttgtacacgccacgctgggaaaacatcacgttgtagttcaggtcctgggacaggccctcccacagtttcatcgcgtgctcatacaggtgcgccgactcgtcccacaggtagttggaacgcacgatggtggtgttgcgcgcggtgttaccgccgcccagccagcctttctcgaccacggccacgttggtgatgccgtgctctttggccaggtaataggcggtcgccagaccatgcccgccgccgccgacgatgaccacgtcgtagaccttcttgggggtcggcgtgcgccacatcttctgccagttttcgtggtggctgagggagtgcttgaagaggccgaagcccgagtagcgttgcatagtcattactccaaaaccgcgctcagcgataaaccgggaaatcagcgcacagggcagacacgtgcttggccacgttggcctcgacatcggcgtcgccgaggttgtcgaggatgtcgcagatccagccggccagttcgatgcactgcggcactttgaaaccacgcgtggtcaccgccggggtgccgatgcgcaggcccgaggtcacgaacggcgactgcgggtcattcggcacggcgttcttgttgacggtgatgtgggcgcgaccgagggcggcgtccgcctctttgccggtgaggccctgacggatcaggctgaccaggaacaggtggttatcagtgccgccggacactacatcgtagccgcgtttgataaacacgctggccatggcctgggcgttgtcgatcacttgttgttggtaagccttgaagcctggctccagcgcttccttgaagcacacggccttgccggcgatgacgtgcatcagcgggccgccctgggcgccggggaatacggcggcgttgagtttcttttcaatttcttcgttggacttggccaggatcaggccgccgcgaggaccgcgcagggtcttgtgggtggtggtggtgaccacatcggcgtagggcagcgggttcgggtacaggccggcggcaaccaggccggcgacgtgggccatgtcgacgaacagcagcgcgcccactttgtccgcgatctgacggaagcgtgggaaatccagggtcttggagtaggcggagaaaccggccacgaccattttcggcttgtgttcgacggccaggcgctcgacttcgtcgtagtcgatcaggccggtgtcggtgttgatgccgtactgcaccgcgttgtacagcttgcccgaggacgacactttggcgccgtgggtcaagtgaccgccgtgggccaggctcatgcccaggatggtgtcgccggcattgatcagcgccaggtacaccgcgctgttggcggacgaaccggaatgcggctgcacgttggcgtaatcggcgccgaacagctgcttggcgcgctcgatggccagggcctcgactttatccacatgctcgcagccgccgtagtagcgcttgcccgggtagccttcggcgtatttgttggtgaggccgctgccttgggcttccatcacgcgtttgctggtgtagttctccgacgcgatcagctcgatatgatcttcctggcgctgctcctcggcattcatggccgccagcagtgcgtcgtcatatccctggatctggtcttgtttgctgaacatcgcgtctctcccagcctttcgtattgttgaggcccgtgcagggccctttgatgcgatggtagggctggcgcagacaggtcaaatgcctacgcacgccacgcaaaggtgcgtttacgacatagcgggaacaacgcggaaaaaatgtgggagggggcttgcccccgattgcaaagtgtcagccaccgcatctgcaagctggcccaccgctatcgggggcaagccccctcccaccagggtttatacgatgatctggcggatgagtagcagcagcaggaaatgcaggggatagagggtgtaggcccagcgacgcatggcgggtggcgagatgtttttcccatgtcgcaataagaccaagcctgccaatggcgcaatcaggcacgcagccaaccccaacagcgccacaggcgtgccgctatcgagcaggatttgccattggttggcggcgacacagaccaaacctggcaatacgctgaaataccatgggcgactgaacaccaatagcatagccagcggcagcaagaccccaaacaaaccgaacatcaactgcgcggaaaacacggccgcaatcgtgacggcaattagcgccaatcctcgatcaaaaagcgccttctgctgccatcctcgggcaaccagcaaacccagcgccagggttggcaacacattcaacgtatcggcatcctcgattaacatccgatacggcacctcgctgatcacgctgaacagcaacaaccagcccaggtaactcccgctcaccggcgcgtttttcgcccggtgcaaattcgccgcaatcgccaggcaaaaccacggaaatgccaggcgccccggcacatacaggccatccaggcttaaaccgacatagcgcaggtggtccagcaccatactcaacagcgccagccacttgagcagatccaaggcgccatcgcggacacgtccgacaggcatcgttccagtaccgtgcataattccccagtgactttgcatttacagagcgtgcgcacccgcgacaatcttggttacagtgcgcaccaacatcgaccacaggaatgggccatgaccgacaagagccaacaattcgccagtgacaactattccggcatctgcccggaagcctgggccgccatggaacaagccaaccagggccatcagcgtgcctacggcgatgatgaatggacccaccgcgccgcagacggtttccgcaacttgttcgaaaccgactgcgaagtgttcttcgccttcaacggcaccgccgccaactcgctcgcgctgtcttcgctgtgccagagctaccatagcgtgatttgctcggaaaccgcccacgtcgaaaccgacgaatgcggcgcgccggagtttttctccaacggctccaaactgctcaccgcccgcaccgaaaacggcaagctgaccccggactcgatccgcgagatcgccctcaagcgccaggacatccactaccccaagccacgcgtggtcaccctgacccaagccacggaagtcggcagcgtgtacaccccggaagaaatccgcgccatcagcgtcacctgcaaagagctgggcctgaacctgcacatggacggcgcacgcttctccaacgcctgcgcgttcctcggctgctcgcccgccgacctgacctggaaagccggtgtggacgtgctgtgttttggcggaaccaagaacggcatggccgtgggtgaagcgatcctgttcttcaaccacaagctcgccgaggacttcgactaccgctgcaaacaggccgggcagttggcgtcgaaaatgcgctttctttcggccccgtgggtgggcctgctggaaaacgacgcctggctcaaacacgcacgccatgccaaccactgcgcgcaactgctgagcagcctggtggcggatattcccggtgtggagttgatgttcccggtgcaggccaacggcgtgttcctgcaactgtcggagccggctatcgcagcgctgacggccaagggctggcgtttctataccttcatcggcaaaggcggcgcgcgcttcatgtgtgcgtgggataccgaggaagagcgtgtaagagaactggcggcggatattcggaaagtgatggaagcctgatgccacgggcatttcagcccgatttcagagactgtttgtacgtatttctgacagtatctatctagcccctgccctggataagatctcgtcaccccgaacgcaacggacgcgttgtttcggggctgactgcctgccgaatagtcggctggaaatggaaatcccacagagggcaacatcatggaaattcaatgctacacgactgattctcagcttcgatccgaggccaacgccaccctcgtcggcctggacgacctgaggaaactggcgaatgttggtgacactatcatcgagccttcaaggctctttaccgtcaccggtaaagagttcgaaatgacagcatccggtgcgtacatcatcaacctgttcgtgcgttaaccactgactgtgggaggggggcttgcccccgatggcggtggggcattaaccaatgcgctgactgacacactgctatcgggggcaagccccctcccacatttagaccggcttcgttagtcagaactcgatacgcacatcacccttcggcacgctgcagcacgacaggatgtagccttcggcctcatcttcctcggtaatcccgccgttgtggtccatctcgacctcgccgcccagcttcagtaccttgcacgtcccgcagatacccatgccacaagcttttggaatcaacaggccaagcttggctgctgctgcgtgcacggtttcgcccggcgccacgcgaatgctcttgcccgacgcaatgaactccacctggtgcagatccgccaggtcgatttccggtgcgtcggcggcctgctcggcttgctccaccgcatccgcacgggcctccggcggcgtggcgccgaaggactcctcgtgataccgcgtcatgtcgaaacccgccacttccagcaggcgcttcaccgcgttcatatacggcgtaggcccgcagcagaacacttcgcgctcgaggaagtccggcaccatcagttcgagcatcttgtggttcaggtaaccgcgataaccggcccatggctcacccaacccgtgtttctcgcagatcaggtgcaggctgaagttgtcgatccgcgacgccatgtgctccagctcgcggtggtaaatgatgtctttgggcgagcgggcgctgtggataaacgtcatgtcgacgttggcgttggtgtcgtagaaccaacgggccatggacatcaccggcgtgatgccgacgccgccgctgaggtacaacactttcgggctaggaaagtcgatggcattgaacaggcccaccggtccgtgtaccgcgagctcctggccctcgtgcaacgtgtcatgcagccagttggaaaccttgccgcccggcacgcgcttgatggtcaccgagaagctgtacggcaccgacggcgagctggaaatggtgtaggagcgcatgatcggctggccttcgatctccaactccagggtgacgaactgccctggcttgaagaagaacaggatcggctggtcggccataaagcaaaaggtgcgcacgtcccaggtttcctggatgactttgacgcaccggacgatgtgccgaccattggcccaggtctgggtggttaccggattcaggaaattattggacatgttgttctccaccgccgacgtcggccttatggtggcgattctgcgtaacgccggaaccacccatttacctatctgcgacattcacatacttatcgcgaccagcccccaacgacctagggttgcgcgtcgggaacagattgggccatgtcgcccatggataaggttctgacgttgcgcggccccacactcgctcccaacaacgacgctttctttatgccttgcgtagtacaaccgtagccactattcgccggccacacagaatggccatgaggacacacacgatggacgtcaccgcaaccttaagcttgggcgatccgctggaacccgcacgcaaggccaccgcgcagatgctgcaagagcgcgagcgcactttctcgctgccgcagccgttctactctgatgagcggctgtttgatatcgacatgcaggagatcttccagaaagagtggttgatcgccggcatgacctgcgaaatccccaccaagggcaactacctgaccctgcaagtgggcaaaaacccgatcatcgtgatccgtggcgccgaaggcgtggtgcatgcgttccacaacgtttgccgccaccggggctcgcgcttgtgcaccagcgacaagggcaaggtcgccaaactcgtatgccactatcaccagtggacctacgaactggacggtcgcctgctgttcgccggcaccgagatgggcgccgacttcgacatgaagcagtacggcctcaagccagtgaatgtgaagaccgccggcggctacatcttcatcagcctggccgagaacccgccagccatcgatgacttcctgtcgacgctgaaccactacatggaaccctacgacatggagaacaccaaggtggcggtgcaaaccaccttgatggaaaaagccaactggaagctggtgctggaaaacaaccgcgagtgctaccactgcaacgcatcgcacccggaactgctgaaaaccctgctggaatgggacgacgtcaccgacccacgcgccgaccaggcgttcaaggaccatgtggccgcctccgccgccgcctgggatgccgagaagatcccttacgcccacgccagcttcggcctgcgtaaccgcatcgtgcgcatgccgctgctcaagggcaccgtatcgatgaccatggacggcaagcagggctgcgccaagctcatgggccgcatcaagaacccggacctgggctcgatgcgcatcctgcacctgcctcactcgtggaaccactgcatgggcgaccacatcatcgtgttcacggtgtggccgatcagcgcccaggaaaccatggtcaccaccaagtggctggtgcacaaggacgccgtggaaggcgtggactacgacgtagcgcgcatgcgcgaagtgtgggacgccaccaacgaccaggaccgtcgcctggccgaagagaaccagcgcggcatcaactccaccgcctaccagcctggcccgtattccaagacctatgagttcggcgtggtgaacttcgtggattggtacagcgagcgcatgctgaacaacctgggcgcagcaccggcaccgtacctcaaaggcgtgcctgtacagggataaaccgctttttgtagtgagcgggcttgtcccgcgttgggcggcgcagccgccctgaaaccagacaccgcgacctgcctggcagagcgcggtgtttttattggggcggctgcgccgcccagcgcggggcaagcccgctcactacaaataatctgcccatgccgcaagctgggtattttttgatcacttccttgtaagccaggtgttacctgggctgtgaagcagcaccaacatcttatccacagaaacgcgcacagactttgtgggcaactgtgctgcgcactgtggaaaactcgccgtgaccccaggtaattcgagaataggcacaatcgatcattttttgatcacaccgatcaaaccccttgtttacgggccttttatcggatagcaaacatgttatccacataaccaccaacagactttgggggcaacttttaatcctttgtggaaaacccaataaagaccatgaaaatcaaggcttccactgacattttcatgccaaatgcgcgattctggtcatattttaatcacccccaccaaagcctttatttataagggctagagccgacagcgaacatcttatccacagaagcgccaacagactttgggggcaactctgcatcggagaatcagcttgattggcgaaaaacctgaataaaaaccgtcagttagcctggttgtttttcgtacagagggctggagagcttgaaatacaaggggtgcggacagccgcgaacaggttatccacaagtggatcaacagggattgtgggtaagaaccctgtaggaggaggcaagcccccttctacagtctgggttcagcgcaccacgccttcttcgatgagtagctggagaatggcctctgcgcccgcctcagggctcaggcctttgagcacctgcccaccaccgccactggccttggccgttgcagccttcatacggtcagcgccgcttttggccttgatcaccttgaggcgcttgggccgtggcttggccggctgcaacaccgcagcattgaacaactcatcctcttcaatctggacgtcatgcgccgccaactcgccgcgctgcgccgggccgtaggcgctttgccgtggcttgggtgcagcgttatccacggtcgccaggaacggcaaacgcaccttcaagcgccgccgctgaccacggggcaaggcttgcagcacatgggccacgccgccctcaatggactccacctgcgccagcccgacgatcagcggccagcccagttgctcggccagcaggaacggcagcatgcccgagccttcaccggtttcggcctggctgccggcgagcaccacctgggcaccggcatcgcgcaggtactcgctgagcaccggcaacgcatcgctgcccgccggttgctccagcacatgcaattgcggcaggcccatgcccaggtagctgcgcaaggtcggttcggcgatgttgccggcgtgcagcacctgcaacttatcccccgccatttgcaggcccagttccacggcacgcgcatcctgctcggcacggcgcgggcgcccggaggtagggtgggcgccgatggacaccaggctgattacattcgtgttcatgaccatatccttaagctgcatcgcgcttggcgccattgcggtaggcctcgaccgctgcgatcaaggcatgcagtattgcggcgctttcgccgatcaccgacaggtcggcacgcttgatcatgtcgcagccagcgtcgaggttgatcgccaccaccttgtcgcaagcaccgatgccttgcaggtgctggatcgccccggaaatacccacggccacgtagacccgcgccgtgacccaggtgccgctggcgccgacctggcgatcgcgcgccatgaagccatcgtccaccgccacccgcgaggcgccttcggtggcgcccagggcggcggcggtctggtggaacagcgcccagtccttcacgccgttgccgccggagaaaatgaactctgcctcggccatcggaatcgccgccgggtccaccgccaccgcgccgaggtcttcgatgcgtggcaggctgcgtgccagggctgtggataactctacgggcagcacttcgtgacgggtctcgctgaccgggtcggcacattcggcagccgccaggatcaagcgcggcagtggccgagccaagtcttcctggccagcaccggcacggccgatgcactcgtcacccttgatctgccacacccgcgtggccgggcgctccttgaggctggcggcaaagcgccgacccaactcgccacccccgctgcggctgtccggcagcagccagtggcgcgggttgagctggttatccacagcccgcaggccctggacgcgttgctccggtgaataaccgtcgaatgcatggccttccagcaccagcaaacggtcggcacccgccgtggcaaacgcactttccttgtgttcaccaaacaccaccgccagcaccgcgccgtcgctgccggccagttgccgtgccaggccaagcaggtcgcggtcgtgactgctcaggcggccgccgaccatgtccggtaccacgttgatgtagaacgcgggggctgcaatctgatgcagcggcaattgcacttccaccgctgccgtacgtttggccgcaccgccctgctgggcgccactgcggtcgatgcgcttgatgccgttggggccgataaaaccgacgccatgcacattcttgcggatgacgccgttaggccccatccagctgtgctgcaccggttgcattgccgcatgcagcgggtgcaggcggttgcgggcgatccattcggcccgtgggtcgcggcggataatgtcgctcatcagtgcacctccgcaggttcacgcttgagtggggctttggccggtgcagcgccttccagcaatgcgtcggccaccagctcggcaatgtccttgatcaatgggcgcggctcgaccacgccttccagcatcgcggtgcattgcgggcaacccacggccaccagctcggcaccggtttcgcggatgtcttccatgcgcatatcggggatacgttgcttgccgggaatgtcagtgatcggcgcaccgccaccaccgccgcagcagcgtgaacggaagcccgagcgttgcatctccttgacctcgatgcccagagctcgcagcacttggcgcggcgcctcgtattcgccgttgtagcggcccagataacaagggtcgtgataggtcacgctgttacctttgtgctgccccaggttcaacgcgccctcaccgatcaactcggccatgaaggtgctgtggtgctgcaccacgtagttgccgttgaaggcgccgtactcgtttttcagcacatggaagctgtgcgggtcgcaggtgacgatgcgcttgaagctgtacttggccagggtctggatattgcgcgaagccagcagttggaaggtcgcttcatcgcccaggcgccgggcgacgtcgccgctgtcgcgttcttccaggccgagcacggcaaagtcgaccttggccgctttcagcactttgacgaaggcgcgcaaggtgcgttggttgcgcatgtcgaacgcgccatcaccgacccagaacagcacctcggcactacctttttcgctaagcaatggcaggttcaaatccgccgcccagttcaggcggccacccggcgcgaagccgccagggttgtcggtggcgatcaggttttccaggacttcggcgcccttgttcggcgtggcgcccttttccaaggtgaggtggcggcgcatgtcgacgatggcgtctacgtgctcgatcatcatcgggcactcttccacgcaggcacggcaggtggtgcacgaccacagggtctcggcgtccaccaggccgttgacgatcggctggtgcgggttgccgccgtgctcgcccacgggtttgcccggatacgggctgccggcgaacctggcatcggtgccgccagccaggccgaccaccatgtcctggatcagctttttcgggttcagcggctggccggcggcgaacgccgggcacgcggcttcgcacttgccgcactgcacgcaggcgtcgaaaccgagcagttggttccaggtgaaatccttgggtttctccacacccaggggcgcagtcttgtcactgaggtccagcggtttcaacccggtggaacgcccaccgccaaaacgctcggcgcggcggtgccaggccaggtgcagagcaccggcgaaggcgtgtttcatcgggccgccccaggtcatgccgaagaacatctcggacacgccccacagcacaccgacgctgagcaatgccgcgagcagccagccgccgaagtccgccggcaggatcccggccaccggcagcgttaccaggaagaaactcaccgagaacgccatcaggcttctcggcaggcgcatccacgggcctttcgacaggcgcgacggcgggttgcgccgacgcagatagacgaaggtggcgccgacaaacatcagcaccgaggccagcagcaaggcgtagccgaggatacggttgtgcaggccgaaaccgtggaccaggatcgccagcaaggccgacagcacgaagcccaacgcggtggcgacgtgggtattggcgatgtatttgtcacgggcgaccacgtggtgcaggtcaaccatgtagcgcttgggcatggccagcaggccgcccagcaggtcgaccttggacgcgcggccacggcgccacatgttcacccggcgcagggcgccgaggacggcgaggcccagggcggtaaacaagagaataggcagcaaggtgttcaacatggtgaagctcccacagaccgcacaggtctactgtgaaactggcgctgaatgtgggagggggcttgcccccgatagcagtgggtcagctacagctgtatcaactgacactccgccatcgggggcaagccccctcccacatttggagcgagtacacattggttcaaggctggctcagaaatctttgcagaggcgcagggcgtcgtagatcgcagcgtgggtattacgctgcgccacacagtcgccgatgcggaacagcaagtacccatcgcccgtctcgctaaggcacggctgcggcttgatcgcgaacaaggcttcgacgtcgatctggcctttgttgcgcgagccttccttgagcgcgtagtagatggcttcatccggacgcacgccgttctccaccaccacctgatcgaccacccgctcctctttggcgccggtgtattcgttctccagcaccgccaccagcttgtcgccctcgcggtagaccttttccagcatcatgtcgccggtcatgatcacttccttggggtacatgctgcggtagtaggtcgggaacgacgtaccgccgatggccacgcccggcttgatgtcgtcggtgacgatctcgacctggctgcctttgtccgccaggaaatccgccaccgacataccggtgaattcgcagatggtgtcgtacaccagcacgttcttgcccggcgccaccttgccgtcgagcacgtcccaactgctcaccaccaagccttcagcggcgccccagtgttcgttctgctccacattcgggtgcccgcccaccgccagcaccaccacatcggggcgcaggtccaggatggtgtcggcatccgccgccacgcccaggcgcaggtcgactttcaggcgcgccagttccaactggaaccagcgcgtaatgccggcgatctggtcacgctgcggcgctttcgaagcggtggtgatctgcccaccgataaattctttcttctccaacagagtcacatcatggccacgttcggcggccacgcgcgcagcttccatcccggcaggaccggcaccgaccaccacgaccttgcgtttgacgccggtggttttttcgatgatatgcggcacgcccatgtattcacgtgacgtcgcggcgttctggatacacagcacatccaggccctggtactggcggtcgatgcaataattggcaccgacgcactgcttgatctggtcgatctggcccatcttgatcttggcgatcaggtgcgggtcagcgatgtgggcgcgggtcatgccgaccatgtccacataaccgccttccaggatgcgcgtagcctggttcgggtccttgatgttctgcgcgtgcagtaccggaaccttgaccacttccttgataccggcggccaggtgcaaaaacggctccggtggataactcatgttcggaatcacgttggccagggtgttgtgggtatcgcaacccgagcccaccacgccgatgaaatcgagcatgccggtgtcgtcgtaatacttggcgatctgcttcatgtcctcgtgggacaaaccgtccgggtggaactcgtcaccgcacaggcgcatgcccacgcagaagtcgtcaccgacctcggcacgcacggccttcagcacttccaggccgaacttcatgcggccttcaaaggtgccgccccattcgtcggtccgcttgttgacccgtgggctccagaactggtcgatcatgtgctggtgcacggcggacagttccaccccgtccaggccaccggccttggcgcggcgtgcggcctgggcgtagttgccgatcacgcgccagatttcttccggttcgatggtcttgcaggtggcgcggtgcaccggctcacgcacgccggacggcgacatcagcgtcggccagttgaagccgtcccaacgcgagcgacggcccatgtgggtaatctggatcatgatcttggcgccatgcttgtgcatggcgtcggccaggttctggaagtgcgggatgatgcggtcggtggacagattgaccgaactccaccattcctgcgggctgtcgatagccacaacagaggaaccgccgcagatcgccaggccgataccgcccttggctttctcttcgtagtacttcacatagcggtcagtggtcatcccgccgtcggtggcatacacctcggcgtgggccgtactgagcacgcggttgcggatggtcagtttgccgatctggatcggctggaacattgcttcgaaagccatggcacggtcctcggcttacaacggcttgacggtgaacaggccgtcatcgtggccctcttcggagcctccgtagacttgttcggccacagtgcggatcttgctgccacgggcctcaagaatctggtccatggcaccggcaaaccagccggtgaacatgtagtcgaccttgcgcccgaccttgccgtacacgtagacgaacgccgagtgttcgagcttgacgctggcggtgcctttgtcgaggtcgatgtcctggatcttgaacaggccccagccgcgttgcgacaggcgcttcatgtagtgctcgaacaccgcgacgccttccaggccgtggcattcggcttctttctcgcaccagtgccaggcggacttgtagccggccttgtagaggatttcggcgtaagcctcggcgcccagcacttcttcgatgcccatgtggttgttgacgaagaaatggcgcggcacgtacagcatcggcagggcgtcggaagtccagacaccggtttcgctgtcgacttcgataggcaattgcggggcgatcttggccatggaaacttaactccagaaaattcttgtgtagtgccccggcgcggatggccggggaagaagatgcggtggcggtggcttactcgccccagacgtccttgaggacgttgacccagttctcgcccatgatcttgcgcaccacacgctcagggtggccgcgtttgagcagggtctcggtgaggttggggaactcgcccacggtgcggatgcccagcgggttgatgatcttgccgaagctggtcaggcggcgtgcatagcccttgtcatgggtcagcatttcgaagaaatcctggccatggccctgggtgaagtcggtgccgatgccgatggcgtcttcgccgacgatattcatggtgtattcgatggcttcggcgtaatcgtcgatggtcgaatcgatgcccttggccaggaacggcgcgaacatggtcacaccgacaaaaccaccgtggtcggcgatgaacttcagctcttcatcggacttgttgcgcgggtgttctttaaggccggacggcaggcagtgggagtaacacactggctttttcgattcgaggatgacttcttcggacgtcttggaacccacgtgggacaggtcacacatgatgccgacgcggttcatctcggcgacgatctcacgcccgaagcccgacaggccgccgtcgcgctcgtagcaaccggtgccgaccaggttctgggtgttgtagcacatctgcaccacaccgacgccgagctgcttgaagatttcgacgtagcccaactggtcttcaaacgcatgggcgttctggaagccgaagatgatgccggtcttgccctgttccttggccttgcggatgtccgcggtggtcttcaccggaatcaccaggtcgctgttctcacggatcagggtctggctggccacgatattgttgatggtggcctggaacccttcccacaccgacaccgtgcagttggcggcggtgagcccccctttgcgcatgtcctcgaacaggtcgcggttccacttggcaataatcagcccgtcgataacgatgctgtcggcgtgcaattcggctgggctcatcaggcgtccccttattggcgattcatgcgccgaatcgtctgccggcgctttggggccagcatatgcccaggggccgacagagccgggtgcaaaaacgacaggggaattgccgaaagcgtcaatccgcgacaaaggctgttaagagaggtctgactcgcggctgttctttgtcttacgcttgagccagaattcgggcattacctgatatgagacggcgcaatgaaatcgattttcctggctttggcactcatcgcaaccggcgtccacgcggctgaagacaccgacagcacgccgtgcgacggcatcgaaaacgacaagcaaaccctggaatgcgccacctataacaaaaccaccgccgaacaactgctcaaagacaactatcaaggcctgctcgaacgcatggcgtcgacctacggcagcgacaagaccaagctggcggacattaccgctcgtctgaaggatgcccagcagaagtgggaaaaactgcgtgatgctgattgtgccgtggacaccttcccggcggtgaccggcaccaaggcctatgcgattgcacagaatgactgcctggcacggatgagtgatgagcggtcggagtttttggagtcgattgggcaagagtgacggttaaaaggccttccatattgagttgaaggccatttgcagatgatcacgctgagtcttgtcgatattgaggtccgcgcaatgctggccccactgcgataaggcctccatcgtctgctcgatgtaaaggtcgggctcgagaaagctgaagggtgcgcagaccttcttgatcgcctggcgtgatggctggcctgcacctgcaaaagcacaggtgtgctcattcccgccaccgctggtagtggcaaacgtcaggtcataggctggcgccatctgccagccagccgaagagccgaagaaagagaagtttttcgcgtgatcgtcgcgattgtgtgccaacgcattgaagaccatcagccgggccattttctgcacatccccggcgttttgggtgatggcgaaggtcagacgcaacaggtcgccgtagtcaaggctgggcatgcggaaatcggcatacaggatcgccgcgctggtcagcatatgacgcttgatgtggccggtgcggtcaaagcgtcgagtgctgaagaaacgttctacgccggtatccgtctgcacctcgagcaagcttgaatccgagatctcgacccccgcgttacgagcgaccatggcgtaggcttgctcgatagcgccactgtcgcgaggctcgtcctggctgcggaatttgatcaaccagtgttcatagccttcaggcatatcgccaaatgaagagatggcctgcgtcttgtcggccgaaagcccaatcaccgcttttggtcgcgcaccaccgggagagccgcccgccaggcgcaatgactcgatcacctcatgcgtttccccagacaacacgttttgcgaagcctggtaaagggaggccaggtccaactcgcctggctctggatccttctcgaacatcggcctgtactccagcgcccccatgccccggttgcccatataggccagccggtccaatgggcggatcgtacgccgttcaatccccagttccatgcgaaaaaaccggtccatcagcaacagcccccagccatcgggcaacgaatcgctgaacgctcccggcaggccaccgaacagcaacgggtcggctgccaactgaggcgtagaagagaagtccatgtacagcggcgccaagttgaagccgttcgccagccaacccggatcatacgaaaaataaattcccctgccgggcgcatccaccagctcaccgacgtgtgaaccttgcaacatgacgtgcaatgcggagactgttttcatcgacgtcctcgaagcctggtttgacctttcaattcctgaagactgatcggcggcggcgcgctgaacagattcgccatttgtgcgcctacccccaggctcatcgcaatcagcagcaaggcatcaagggaaacctttccggtcgtttcaaagcgcttgagcgtggactcggcaacccccgactgggctgccagggctcggcgagaaaggttcttgctcagccgcagcgccttggcattccctgcgatctgcaaagcaatctcgccgggggcgtagagaatatgagtaagggccatggttcgacctcaagtgagtgttagcaagtgtagcaggcgctgaataaacctatcacataacggacaacgggttatccaaaaatagactttattgttaataacagacaatattttatctcttatatttttatgagtttcatctggcctgcgacacctttgacccttctcgaaaggtgcgcgaccatctgcgccatctcacatccttcaaggccagaccatgaaaacctgcggcatcgaaatcaaaggcagcgaagccatcatcgccgtcgcgtcactggacaaccagacgctggcccacgtcgccctggcgaccaagaaaattgccctggaagacgacgacgaggccgccaacgtcaaagccttcgccgcacaggtaaaggcatttgtgcaggaaaacgccatcgagcgtatcgcgatcaagaagcgcagcaagaaaggtgaattcgccggtggcccgaccacgttcaagattgaaggcgtgtttcagttgctggatggggttgaggtgacgttgctgtcgccgcagacccttaatgcgcagaataagaagcacaacttcgaactgccggcgacgctgaacaagtatcagcatgaggcttacaaggcggcgtgttcggcgctgctgaagaaataggccacatcattaatctactgtgggagggggcttgcccccgatagcggtgggtcagccaacgttgtatcaactgacagcctgtcatcgggggcaagccccctcccacatgtcagcgcttgttgcgcagccagtcgccaaaggttttgtcctccagggcataccctccccggctcgacttccacaccagctctttatcgcgaagggcatcgatacaggcctgaatcgtctgggtgcccggcaccacgtcgctgcccatgtcctccagcgccttgctgaccgccgttagggtgctgtcggtgaacggcgcgaagggttcgttgttttgcgagcgctccaccatcacttccagaacggcgcgctgggggatggtgaggttgttccaggcgctttcgaattcggtccacacaccggcacgcagcagttcggcacgactgtgcagcaactggccgaggttgctggcctcacccagctccagtgccacttcaccgatgatcgtgcgcaacatctcgggacgccggccgaccagttcaaaggcttcatcaatatcggcggcgttgaattggttggtcttggccaggtgcgcgttgaggtgcgcggtgtaggcctgggtgaactctttacccagcagcgggaacggcgtgatgctggagccgaagaacggctgacttttacccagtaccaagtgagccagcttgtcgcgattggagccggtgaacaccagatgcaaaccgctgccgtcctcgtcacgcccttggttgagctgatcccgggcagccttgagggcgaacatcgcattgatgcctgaatcgctggtcaaggcgtgctgggcctcgtcaatcaccagcacgaccggtttttccgcagcgcggtggagcaactccaaggcctgggtcaacgtcgcgccaagcggcaattgaggcttgctgaagtcccaggacagggtacgcagaaagctcagtttctcgattccaatgtgcttggccagcttgcgaatgcccttttcatagggcaccagcgcggcagcaatagcactggcaatcaactccgcgggatctttctctttgtctgcccacagatcgacatacacggtaagccaacctcgaagctgacactccgggatcagatcttcacgtaaaaaagtacttttgcccgtacgacgcggcgctgcgagaaacaggccagaggtgaaatcctggatgcctgcgcctaccagcccgtcggcaatgctgcaagccagggtggggcggcggaatacaaagccgctgtgcttggacatggttttatactcaattatggaaaggactataaattatagtcgcgagtataattgactataattgcccattacaccacctcccgtcgccgatcctccctcggacatttcgcaaaccgcgcccgataactgcgggtgaagtacgacggcgactcgaacccgcacgcaatactcacctccagcacgctcataccgctttggcgcaagagctgccgggctttttccaggcgcaggccaaggtagaagttgctcggggtgtcgttcaggtgcaggcggaacaggcgctccaactggcgccgggtgactttgatcgcctcggccagggccaaggtgctcagcggcggttcggtgtgctgttccatctcaccaatcacttgcaccaattttttgttgttgatgccgtagcgtgtggcgatctgcatgcgctggtggtctttgcgcgggcggatgcgcccgagcacgaattgttcggagacctggatcgccagctcggggccgtgggcctgggcgatcaggtcgagcatcaggtcgatggaagcggtgccgccagcgcaggtgatgcggcggcggtcgatttcgaacagttcctgggtgaccgtcaggtgcggataggattccttgaacgcgtcgatggcttcccagtgcaaggtgaggcggtggccgtcgagcagcccggcttcggcgaggacgcaggcgccggtgtcgatggcgccgagggtcacgccatcgtgatcgaggcgacgcagccagtgctccagcgcaggcgtggcgaactgcagcggctcgaagcccgccaccaccaataacgtcgcgccctttttcaacggttccagcgcagcgtcggcgttgaccgacatgccattgctcgccagcaccgcgccgccatcggcactcaatacatgccagcggtacagctcgccacgaaagcggttggccacccgcagcggctccagcgcagagataaagccgatggccgaaaagcccggcatcagcagaaagtagaaatcctgggacatggtggcgctctcgtaggacgggcagcgtgctcactgtgatacgccagttcaacgagccattcaagggcacaggtcgctgcagtgcaagagctggtcgccgccgtgcgttttgtcggccctcaagctgcgtaatttgatcccacggcgcacaaagacgccggcccccacaataacgacctgccgagggacccaccatgaaccgactgatcagccgctgcgtgctcgcactcagcgccagcgccatcttgagcacgaacgtactggctgccgacgcggcatcctgccagaacgtgcgcatgggcgtggtgaactggaccgacgtaatcgccaccagcgccatgacccaagtgttgctcgacggcctcggctacaagaccaaacagaccagcgcctcccagcaaatcatcttcgccggtatccgcgaccagcgcctggacctgttcctgggctactggaacccgctgatgacccagaccatcacgccgttcgtcgacgccaagcaagtcaaggtgctcgacaagcccagcctggaagacgcccgcgccaccctcgccgtgcccacctacctggcagacaagggcctgaaaaccttcgccgacatcgccaagttcgagaaagagctgggcggcaaaatctacggcatcgagccaggctcgggcgccaacacccagatcaaggcgatgatcgccaagaaccagttcggcctgggcaaattccagctggtcgagtccagtgaagccggcatgctcgccgccgtcgaccgcgccgtgcgccgcaaggaagccgtggtgttcttcggctgggcgccgcacccgatgaacgtcaacgtcgccatgacctacctcaccggcagcgacgacgccctggggccgaacgaaggcatggccaccgtgtggagcgtcactgcaccgaactacgccgagcagtgccccaacgtgcacaaactgctgaccaacctgaccttcaccgccgccgacgagagccggatgatgcagccgttgctggatcacaaggacgccatcgagtccgccaaacagtggctcaaggatcacccgcaagaccaggcccgctggctggaaggcgtgaccaccttcgacggcaagccggctgcggccaacctgcaactgaccagcaaataacctgattcgaatcaccgtgtcgcagccattcccggctgcgcacggcatcactacgcccgcctgtaaggaacctgcctcatgaaccacgacgtcatcatcacctgcgcactcaccggtgctggcgacacgaccagcaaaagcccacacgtgccggtcacccccaagcaaatcgccgccgctgcggtggaagccgccaaggccggcgcgaccgtggtgcattgccatgtgcgcgacccgcaaaccggcaagttcagccgcgacgtcgccctgtaccgcgaagtgatggagcgcatccgcgaggccgacatcgacatcatcgtcaacctcaccgccggcatgggcggcgacctggagatcggtggcggcgaaaacccgatggagttcggccccaacaccgacctggtcggcccgctgacccgcctggcccacgtcgaagcgctgctgccggaaatctgcaccctggactgcggcaccctgaacttcggcgatggcgacaccatttacgtgtccaccccggcgcaactgcgggcgggcgccaaacgcatccaggagctgggcgtaaaggccgagctggaaatcttcgacaccggtcacctgtggttcgccaagcagatgatcaaggaaggcctgctcgacaacccgctgttccaactgtgcctgggcatcccatggggcgcaccggccgacaccaccaccatgaaggccatggtcgacaacctgcccgccgacgccgtgtgggcaggcttcggcatcggccgcatgcaaatgccgatggcggcccaagcggtgctgctgggcggcaacgtgcgggtcggcttggaggacaacctgtggctggacaaaggtgtgcttgcgaccaacggccagcttgtggagcgggcgagtgaaatcctcagccgcctcggcgcacgggtcatgaccccggccgaaggacgcataaaaatgggcctcaccaaacgccgctaatcaaaaaatgtgggagggggcttgcccccgattacggtgcatcagtaccgaatgtatcgactgacacaccgctatcgggggcaagccccctcccacactgggccaccgaaatccataggaatgtgccatgagctttatcactgaaatcaaaaccttcgccgccctcggcagcggtgtcatcggcagcggctgggtgtcccgcgccctggcccatggcctggatgtggtcgcctgggacccggcgcccggtgccgaagccgcactgcgcaagcgcgtcgccaacgcctggggcgccctggagaaacaaggcctggcgccgggtgcctcgcaagagcgcctgcgcttcgtcgcgaccatcgaagcgtgtgtgaaagacgccgacttcatccaggaaagcgccccggagcgcctggagctgaagctcgacctgcacagcaagatcagcgcagcagccaagccgaatgcgttgatcggttcaagcacctcgggcctgttgccgagtgagttctacgaaggttcgacccacccggaacgctgtgtggtcggccatccgttcaacccggtttacctgttgccgctggtggaggtcgtcggcggcaagaacaccgcgccagaagccatccaggctgcgatcaaggtgtatgaatccctcggcatgcgcccgctgcatgtgcgcaaggaagtgcctggctttatcgccgaccgcctgctggaagcgctgtggcgtgaagcacttcacttggtcaatgacggcgtcgctaccaccggcgaaatcgacgatgcaattcgcttcggcgctggcctgcgctggtcgttcatgggcacgttcctcacctataccctggcgggtggcgatgccggcatgcggcacttcatggcgcagttcggcccggcattgcaattgccgtggacctacctgccggcgccggaactgaccgacaagctgatcgacgatgtggtcgacggcaccagcgatcagttgggcaagcacagcatttcggcgctggaacgctatcgtgatgattgcctgctggcggtgctggaagcggtgaaaaccaccaaggccaagcacggcatgaccttcgctgaataacggaaaccccgacatgcccgcactcaccacctacaccacccaggtccaccccgactgggtggactacaacggccacctgcgcgacgcgttctacctgctgatcttcagctacgccaccgacgcgctgatggacaccctcgggctggacagtgaaaaccgcgaagccagcggccattcgctgttcactctggagttgcacctgaactacctgcacgaagtgaaactcggcgccgacgtggaggtgcatacccagctgatcgcccatgacgccaagcgcctgcacctctatcacagcctgcacctggtgggggatgagaaggaactggcgggcaacgaacagatgctgttgcacgtggacctggccggcccgcacgccgcgccgttcaccgagaccacactggaaagactcactgccatcagcgccgagcaggctgacctgccgcgccctgccctgctcggccgagtgattggactgccacccaaaaaacgataaggagccaccatgcaaaccgccgccgctgttgccgatttccgtacctacccgaagatctgcgacctcgcgcaggtgcgggtgctggatgatcagattcgtgtgcaatgggccgatgggcggaccagcccgtttcatcatcagtggctgcgggacaactgcccgtgcaccgagtgcgtgtacagcgtcacccgcgagcaggtgctggagattgtcgatgtggacgagcacctcagtgctgtcgacgctcgcatcgagcaaggcttgctgagcgtgcaatggcgcggtggccaccgcagccagtacgatcccggctggctgcgggcgcatgcctacgacgatgagtcgcgtgccgaacgccaggcggcgaaacccaaatcccagctgtgggacaaccgcttccagctaccggttttcgactattcagcagtcatggaagacccgcacgcattgttgcagtggctgctggcgctacgcgattgcggcctcactcaaatccgcggcgtccccaccgagcccggcgccctggcgctggtcgccaagcgcatttcattcatccgcgagagcaacttcggcgtgctgttcaacgtgcaatccaaggccgatgccgacagcaatgcctacaccgccttcaacctgccgttgcacagtgacttgcccacgcgggagctgcaaccgggcctgcagtttttgcattgcctggtgaacgatgccgacggtggcgaaagtatttttgtcgatgggtttgccatcgcctgcgccctgcgtaccgaagaccccgaagcgttcctggcgctgtgcgacatcccggtggagtttcgcaacaaggaccgttacagcgactaccgccagttggcgccgatcattgcgctggatgccttgggcgatatagctgagatccgcatggccaactttctacgcgggccatttgagaccagtgaggaccagatgccgttgctgtatcacgcctatcgacgctttatcgccatgacccgggaagatcgctttcgtgtggtgcagcgcctgaacccaggcgagctgtggtgcttcgataaccgccgcaccttgcatgcgcgcaacgccttcgaccctgcttccggtgcgcggcacttccaggggtgctacatcgaccgggatgagttgctctcaagaatccgggtgttgcagcgataacattggactgattgcgctaggttacctagcgctcctcaactggcaaatttgcggcctcaagggcctctttcttttctacagcggctgcaatgagaggcgccatctcacgcagcatttctaaatcgccactcttctcataaaggctcagccatttgcgtcgaggcctcataatccgttcatcatccctgatggggagtttcttgagcgtattttccgcgcgctctcggaactcggctggaacagcatccgttaacaccaactgaagagatggcagactgatttcgaaccatccttcctgcacttcaaatgggtccaacaatccagcagccacttgcttgcttttagagctgttaatccatccgtcaatgtatcgatagttcgaccattcgtaagcaagcaatcgatcctcgttgtaactgacaccatgatcgacagtaccactggggatatacatcgcggcataaccacaccggtcataaaacccgtccgccagcgcatgcctgaagggtgaccacaagtctcttggtctctcggcagtcgggttttccttaagccaaacaccacccggttttcgacatttttcatcaaacttatctggctccgggataggattcgacacaggcgtcattattttttccctttcgttgctttttcaggtttgccctgagaaacgacccagcgtggccaaaagtcatcaagacctggtaaaacccgaaccaactcttgatgaatagctgacttcgtactcaacttttctggcagctgttccttatcaccacgcatccatgcctcggcggcttcgattgcgtcttctgcggcaactgaacgggcctgttgcaaaccaaaaacatccgagactagccagttcacgacatcgccttgcttggaccacacctctttagtgaccttggcttctccagcctcaaggtgaatgttgaaaacggcatctttctcttcaataaactcaggctcggccgaggccaataccagtggggagtgggtcgctacgatcagctgcactgcaactttttcttgcgtcatctcctctaccactttcaaaagagcaggcacgatccgacgctgccattgaggatgcaaatggcattcgacttcgtcgatcaggaaaataatttctttggcagggttaacttttcgctgcttgcaggcgcgcttatggccattccaagtccagacaatcatgtaggccagcgcagcaattcgacgcattcccgcagaggcatgaaccagtgggacgtcaaggccataggacatgcgcaatgttggatattcggtctcgtccagagggcctatatggcagggctcgcccggcgacaacttctcaatgcccgatggcgacaatgcatccaatgcgactgttaactctttgaaagaagggtctcccgccgttcgctgccaacgaacccagtcatgaattaaaccattacatatatttgttcccttttccgaaattgcccctttccatacctcatcgggagaaaagttaaacgctcgaattttctcttcagttccagcctgctgatccgtccaatagttacgcgcagggtcccaagcagaaaaactgccatccaccccagcataaataacaattcccgggatggatggtcgagccttaggctggcgccaaaaaccgtctttgaaatgaacctcaccttccttgtctccagccgtcaccttgctgaacgcaaaaccaatactagccgcattggaggattctctaggaatcgcctctgctccacgtgcccaagtgcgcgtcaaagcccaccaggcagcatccagcagaaagcttttgccgaggccattgtcacccgtgatgaagttgagacgaggcgcaaactcaaccggcccaaacttttcagcagggccgacacctttgagagacaggagctttagcattgcattaccttttgatttgcctgagagcgtgggctaggttggacgccaacaacgctggtaaagcccacccgtgtaagtaaacagcatataggcattccgggcatttgagctgcggcaatgctaatgccaaacaataacgactagctatcccctattcatcccacccttctagaaacggggcgcccaaaacaaaaaagccccgatcaagccgtgacaagatcggggcatagcgctttgtgtgagccttgcatcccgagggtgaccaaaccttcaaggtgcgtgctggtgttcagtgtgcccattactgctatcggtatatgacccgaaaacgacctgctcatagccatctgagccattcgtggattctgcccttgccgaccggtcggaggcctaccagaatcccaatcaagccccgttccctacaccaggataaacgtcatgatgcatgcggatttgattgaccaggatgacctgctgggccaactgcgctcgctgggtttcgaagtctccagcggcgccaccgccgagcaggcctgcgagtgcgcggtgcgtggtttgagcgaggcgcgggccaaggcgctcaagggcatggtggagcagatgtacaccggcagtgcaacgattctgccggccgtgcgccaggcgatcgataagcagctgttgccggcactggtgcagttcaagcagaactcccgcgcctgatcgattcctatcgggggcaagctccctcccacctttgactgtgttcacccatccaaatgtgggagggggcttgcccccgatacagacacctcggtctagagccgcacgctggcaaacgtcgactcgttgcgcgcctggctcaacgccgacatcggccccgacaacggtgacaacaccagcgcctgcggaatcggcatcatcgccacctgctgggtggtgttggagccgacgcgctcatctcttggcggaatgccgaagtattcgcggtagcacttggagaaatgcggcgtggacacaaacccgcacaccgacgccacttcgatgatcgacatcggcgtttgcttgagcagctgccgtgcacggatcaggcgcagcttgaggtagtaacgcgacggcgagcagtgcaggtacttctggaacaaccgctccaactggcgacgggagacggcgacgtacaccgccagctcatccaggtcgatcggctcttccaggttggcttccatcaacgccacgatttcctgcagcttcggctggttggtgccgagcatgtgcttgagcggcacgcgctggtggtcttgctcgttgcggatgcgctcgtacacaaacatctcggagatggcggccgacagttcgcgaccgtgatcgcggctgatcaggtgcagcatcatgtccagcggcgcggtgccgccggagctggtgaagcggttacggtcgagggtgaacaggcgagtgctcatggccacgcgggggaaggcttcctgcatagaggccaggcattcccagtgcacgctgcaatcaaaaccgtcgagcagaccggcacaggccagggcccaactgccggtgcataccgcgcccaagcggcgcgattggcgtgcctggctttgcagccacgacacgtgttcacgagtcacggtacgctggatacctacgccaccgcacacgatcacggtgtccagggccggggctttgtgcatggaagcatcgggagtgatttgcagaccgtcgctggcccacacctggtttccgtcgacgctcaaggtcgtccagcgatacagctcgcggccggagagctggttggccatgcgcagcggttcgactgcggaggccagggaaatcagcgtgaaattgtccagcagcaaaaagccgatggattgaggcgcacggttctggggttgggccccggagttgaacgacgtcatcgcggtatctcctcacacaaagcgggtgatggcctcaggcgaggctcttgttattgcgctcttcatccggcgaggagagaggctttgaattgatagagcaaatgccatgcctaaatttgaatggccgtccaataactcctaaaaacgacctcatgacgcgtctaaacaagcccgcgcagcaagtatggttatggctggaattggccgtaggaacatgcccggacaaggtgtgtgagcagatcggtagcacttgtgggaaggcgctttgcgggcgtgggagaagtctgtcacccaacgcgcgggagaccggtggtcaggtcggaaatcgttcgcaagctacttatctatttgcgacgcgctaaaaggtggcgcttttggttggggtgttcactttttgcgcagcggcgcctggatgattgctatcgggggcgagccccctcccacctttgactgtgttcaccaatccaaatgtgggagggggcttgcccccgatgcaggcaacgcggtctcagcactccacggcgctgaccgccaacccaccacgcgaggtctctttgtacttgtcatgcatgtccgccccggtatcgcgcatagtgcggatcacccggtccagggagataaagtgctggccgtcgccgcgcagcgccatttgcgccgcgttgatcgctttcaccgccgcgattgcgttgcgctcgatgcacggcacttgcaccagcccgcccaccgggtcgcaggtcaggcccaggttgtgttccaggccgatctcggcggcgttgcacagttgttccggcgtggcgccgaggatctcggccagcccggcggcggccatggcgcaggcagaaccgacttcaccctggcagccgacttcggcgccggagatcgaggcgttcttcttgcacagaatgcccaccgccgccgcaccgagcaggtagtcgaccacattggcttcggtgacttcctcgctgaacttcatgaagtagtgcagcaccgccgggatgatcccagccgcgccgttggtgggtgcggtgaccatgcgtccaccggcggcgttttcttcgttcaccgccagggcgaacaggttgacccattccatggcactcagggtcgaaccgatcacattcggcttgttcaactcctgcaggctgcggtgcagcttggcggcacgccgacgcacgttgaggccaccgggcaggatgccttcgtgcttgaggccttgctcaacgcaatcctgcatggcacgccagagcttcataaggccgctgcggatttcatcttcagaacgccagaccttctcgttggccatcatcaactcggccacgcgcaggttgtgggtcttgcacagctgcaacagctccaccgcgctggaaaaatcgtaaggcaactcggtgcggtccatgtcggccacgccgctttgcgcctgggcttcatccactacgaaaccgccgcccaccgagtagtaagtgtcgcggtgcagctcgccgttgtcacccgacaccaccagggtcatggcgttgggatggaacggcaggttttcgtcgagcaggcgcatgtccctggcccagacaaagggcaccggcaagcgcccatcgagcagcaaggtgtcggtctcgcgcagggtgtgaatgcgcaggccgatttgcgacggatcgatagcgtcaggccattcgcccatcaggcccatgatggtcgctgtatcgctgccgtggccgatgccggtggccgacagcgagccatacagctgaacttcgacgcgccgcacctgttccaacacttcacgttcacgcaagccttgaacgaacaacgccgcggcgcgcatggggccgacggtgtgagaactcgaaggcccgatgccgatcttgaacaggtcgaaaacactgatagccattgccgtagaactcctcgataagcacgggccaggcttgaacgagctgctacgctcagatcgcccagatggcggcatcatcaagcttttgtttgccgtcacggcgtctcacaccgacgcacccatgctcaccagcgtcgcgtctgtgcgatcaccggttttggccgtttttagcggtgcagatgggcaaaaactgcagttttgccttgggaaaaacctgtaagcgacgtcaccgacactggatacgaccctccctgtactggatacgacgccccctgtaggcgtcagattttcactggtacatgatcagtctcgactcgtttgcaaggcaccgtgccagagctgttgtcgcacgctccaaccgcaacacttataaagcgcggcgaacgccgccagaaaaaacacaggagtctagccccatgaaagcttcaccctcgttgttgttggccgccatgctgagtctgccagtcctggcgcacgctgcagaaccggcacaatgtcagaccgtcaacttctccgatgtcggctggaccgacatcaccgtcaccaccgcgaccaccagcgaaatcctcaagggcctgggctacaagccgcgcaccacgatgatttcggtgccggtgacctacaagtccctggccgacggcaagaacatggacatcttcctcggcaactggatgccgaccatggaaaacgacatcaagccgtaccgtgatgccggcaccgtggagaccgtgcgtgccaacctggagaacgccaagtacaccctggcggtcccggaagcgctgtacaacaaaggcctgaaggacttcgccgatatcgccaaattcaaggatgaactgggcggcaagatctacggcatcgagccgggcaacgacggcaaccgcaccatccagacgctgatcgacaaagacgccttcggcctgaaaaccgccggcttcaaagtcgtcgagtccagcgaagccggcatgctctcccaggtcgaacgcgccaccaagcgcgaccaggccatcgtgttcctcggttgggaaccgcacccgatgaacacccgcttcaagatgaagtacctgaccgggggtgatgattccttcggccccaactacggccaggccaccatctacaccaacacccgcaagggctacacccaggaatgcagcaacgtgggccagttgctgaagaacctggtgttcaccctgaacatggaaagcaccctgatgggtaatgtcctggacgacaagatgaaacccgacgccgcggcgaaagcttggctgaagaagaacccgcaagtactcgacacttggctcgccggcgtcaccaccgttgatggcaaacctggcctggacgccgtgaaagcttacctctccaagtaatgccgctgaccccggggcggtgcgctgccccgggatgttttccctcttcgcatgtggacattcactaccatgctgactgaacagaaaatcccactaggccagtacatcgctgccttcgtcgaatggttgacccaacacggcgccaactacttcgacgcaatcgcatcgaccctggaaacgatgatccacggcgtgacgtttgcgctgacctggttcaatccgctggcattgatcggtctgattgcgctgctggctcactttattcaacgtaaatgggggctgactgtgtttgtcatcgcctccttcctgctgatcctcaacctgggttactggcaggaaaccatggagaccctggcgcaagtgctgttcgccaccctggtctgcgtggtcatcggtgtgccgctgggcattgttgccgcgcacaaaccgttgttctacaccatgatgcggccggtgctcgatctgatgcagaccgtaccgaccttcgtctacctcatccctaccctgaccctcttcgggctgggtgtggtgcctgggctgatttccacggtggtgttcgcgattgccgcgccgatccgcctgacctacctgggtatccgtgatgtaccgcaagagttgatggacgccggcaaggcctttggctgctcgcgccgtcagctgctctcgcgcatcgaactgccccacgccatgccgagcattgccgccggcattacccaatgcatcatgctgtcgctgtcgatggtggtgatcgcggccctggtgggcgccgacggcctcggcaaaccggtggtcaacgcactcaacaccgccgacatcgccctgggctttgaagccggcctggcaattgtcttgctggccatcatgctcgaccgcatctgcaaacaacccgacgctaaagtagggggtgatgcatgagcattatccgattcgacaaagtcgacgtgatcttctccaaagacccacgcgaagcgctcaagctgctggaccagggcatgagccgtaacgagatcctgaaaaagaccgggcagattgtcggcgtggaaaaagccagcctggatatcgagaaaggcgaaatctgcgtgctgatgggcctgtcgggttccggcaaatcgagcctgttgcgctgcatcaacggcctcaacaccgtgagccgtggccagctgttcgtggagcatgaaggtcgccagatcgacatcgcatcctgcacccccgccgagctgaaaatgatgcgcaccaagcgcatcgccatggtgttccagaagttcgccctgatgccttggctgacggtgcgcgaaaacatcagcttcggcctggagatgcagggccgcccggagaaagaccgccgcaaactggtggatgagaaactcgagctggtgggtctgacccagtggcgcaacaagaagccggacgaactctccggcggcatgcagcagcgcgtcggcctggcccgagcgctggcgatggacgccgatatcctgctgatggacgaacccttctccgccctcgacccactgatccgccagggcctgcaggacgagttgctggaactgcaacgcaagctgagcaagaccatcgtgttcgtgagccacgacctcgatgaagcgctcaagctgggcagccgtatcgcgatcatgaaagacggcaagatcatccagtacagcgtgccggaagagatcgtgctgaacccggcggacgactatgtgcgtaccttcgtagcccacaccaacccgctgaacgtgctgtgcggccgcagcctgatgcgcaccctggacaactgcaagcgcgtcaacggttcggtatgcctggacccgggcggcgactcgtggctggacctggccgaaggcaacaccatcaagggcgctcgccagaatggcgcggtgatgaacctgcagaactgggcaccggggcaagcggtggaaggcctgggccggctaccgacactggtggactcgaacatcggcatgcgcgacgctttgcagattcgttatcacaccgggaacaagctggtgttgcatgacaacaatcaggtggtggggattctcggagacagtgagctgtaccacgccctgctcggcaagaacctgggctaacactgcacatatcactgtagaaacggggtcaatgtgggagggggcttgcccccgatagcagtggatcagtaataaatatactgactgacatactgcaatcgggggcaagccccctcccacatttaaagcactaccaggcttcagctatagacccggccaaggagttgccgatggctttcaaactgatcgagcacgtcccgggtgatctgttcctgggcgaagcccatcaggtcgtattcctgaggcccgttgtgcaggtacacctcggcacggtagtagcgagtgcgctcttcctcgggcaggtcactcggcgccgacgagtaggcatccaggctcacttcatagacaaacgggttgccctcttccatctcgatgcgtacaccgatgcagcgcttggacttgccgagcaaggtctgcacttccaagccctgatcacgcaacgccgtcgccgcctcttccaacgccggcgtcacatgcttgtccatgaaacgctgcacggtgccttggctcggttgcaggtccagcgccgtcagacgctcgctgaaaccacggcgaccacgctcggccaattgcgcctgctcctgttcgatggccacgtcctggcgcatcgccttgtgcaagccgaacataaagaagatcagcaccaccgagaacggcagccccgccagcaccaccatggtttgcatggcttcgaagttgccggcgaacagcaggccgatggtcaccagggtgatcaccgccgaccagaagatccgcagccagtgcggcgcatcttcgtcaacattgccgcctttgcacgacaggttggccatcatcaccgcaccggaatccgccggggtcaggaacagcacgaagccgacgaagatcgatacgccgatgacgattttcgacgccgggtaatgctccagcagttgatagatggccatcgacggctgttccagtgcggtcttgcccaactccaccgcaccgtggttcagcaccaggtccagcgccgagttaccgaagatcgacaaccacgccagggtaaagcccaacgggatcagcagcacgccggccaccagttcgcgcaccgtgcgaccacgggaaatccgcgcaatgaacatgcccacgaatggcgcccaggaaatccaccacgcccagtagaacagggtccacaggcccatccaacgttcggtcttgtcggcgtcgccttcgtacacgtacaggtcgaaggttttcaggatgatgccgttgaggtagtccccggtgttctgcaccaggccgttgagcaaatgcagggtcgggccgaacaacagcacgaaaatcaacaggccgctgaacagcacgatgttgaggttggacagacgacgaatgccgttctccacgcccgacacggcggcgatggtcgccacggtgctcatcacgatgatcacgatcaacaggttggtgttgctgtgctgcatgccgaacaggttttccaacccggacgacacctgcatcgaaccgatccccaggttcgtcaccaggcccagcagggtcacgaacatgccgaaaccgtctaccgcatggccggccgcgcctttcacccaacgctcgcccaccagcgggtacagcgccgaacgcagggccagcggctggttatgccgatacgcgaagtacgccacggccaggccgaccagggcatagatcgcccagccgtgcaggccccaatgcaggaaggtcagttgcagcgcctggcgggcggcgccattgctggcggctgcgccttcgggcgggttgaagtaatggtccagcggctcggaagcaccgaagtacagcagcgagatgccgatacccgacgagaacagcatgccggcccaggcgccgtagctgaagtccggggtgtcgtccttgctgcccagtttcaacttgccgtaggacgaaaacgccaggcccaccacaaacaccaggtaggcggcgatgaccaccatgtagtaccagccgaagcttttcgatagccacgcctgggcaacaccgagcatgcgcccggcctcctgcggggcgatgatcagaatggcggtcaacaacagaatcagcgcggtggaggtgtagaacacccaaccgttgacccgcaccttttccggtggggtttttataagagaggcagaactcatggcgcagatgctccgggcagtgcgagagagaaacacaaggcaacggttatcccgggacatcgatttttcggcagtcgacggacgggtgttataaagacaccccgaaaattcttgaaccccgccgaagcggtgtacaagccctgatacggcctgtttcaaggatttttgcaggtgtcagatgtcgcggctcccaggtaggaaatatctgtaggcagcgaccatttgtcgcagatcttattctttgttgattgaacgttcaatcaaaacaaaatagactggccatcaagccgacggacgtttatcgcccgccgcaggcctaaggagaggtgctacatgcccaaggtcggtatgcaacccatacgccgccagcaattgatcgaagccacgttgacggccatcgatcaggtcggaatgggagatgccagcattgcgctgatcgcccgtttggccggcgtctcgaacggcatcatcagtcactacttcaaggacaagaacggccttattgcagcgacgatgcgctacttgatgaacgcgctgatcgacaacgtccacgaacgccgacaggcgctcacggacgacagcccacgggcgcacctgcaggtgatcatcgagggcaacttcgacgccagccaggtcaacggaccggcaatgaaaacctggctggccttctgggccaccagcatgcaccacccgtcattgcacaggttgcagcggatcaacgatcaacgtctgtattccaacctgtgctgccagttccgccgagtgctgccgctgccgcacgcacgcaaagcagcccgcggcctggcggccctgatcgacggtttgtggttgcgcggcgccctgtcgggagacgctttcgacacggcgcaggcgcaacggatcgcttacgaatacatggatttccaattggccaagcaggtgagttagagcacacataaaccgctcaacccctgaacgtctgccgctcagtgttgccacaccttcatggcccaccgacggcgggtaacgccaaccacttatgcacttgcgaggactttatggcccgtttcgacctgcaaaaactctacattgacggcggctacagcgacgctggcagcgatgccaccttcgaagccatcaacccggctaacggtgaagttctcgcccaagtgcaacgcgcaacgaaagaagacgttgaacgtgccgtggtcagcgccgaaaaaggccagaaaatctgggccgcgatgaccgccatggagcgttcgcgcatcctgcgtcgtgccgtcgacatcctgcgcgaacgcaacgacgagctggccgccctggaaaccctggacaccggtaaagccttctccgaaaccaagtacgtcgacatcgtcaccggcgccgacgtgctggaatactacgcaggcctggtgccggccatcgaaggcgagcagatcccgctgcgcgacacctcgttcgtctacacccgccgcgagccgctgggcgtggtcgccggtatcggcgcgtggaactacccgatccagatcgccctgtggaaatccgcaccggccctggccgccggtaacgcaatgatcttcaagccaagcgaagtcacctcgctgaccaccctgaaactggccgagatctacaccgaagccggcgttccagcgggcgtgttcaacgtgctgaccggcagcggtcgtgaagtcggcacctggctgaccgagcacccacgcatcgagaaagtctcgttcaccggcggcaccgacaccggcaagaaggtcatggccagcgcttcgagctcctcgctcaaggaagtgaccatggaactgggcggcaagtcgccgctgatcgtgttcgaagacgccgacctggatcgtgccgccgacatcgcgatgatggccaacttctacagctccggccaggtctgcaccaacggcactcgcgtgttcgtacccaagcacctgcaagccgtgttcgaagccaagatcgtcgagcgtgtggcgcgcatccgcgttggcaacccgcaggacgacaccaccaacttcggcccgctggtcagcttcgcccacatggaaagcgtgctgggctacatcgccaaaggtaaggaagaaggcgcacgcgtactgtgcggcggcgaccgcctgaccgacggcgacttcgccaaaggcgcctttgttgccccaaccgtgttcaccgactgcaccgacgagatgaccatcgtccgtgaagaaatcttcggcccagtgatgagcatcctcacttacgagaccgaagaagaagtgatccgtcgcgccaacgacaccgacttcggcctggccgccggcctggtgaccaaggacctgaaccgcgcccaccgcgtgattcaccaattggaagcgggtatctgctggatcaacgcctggggcgaatccgacgcgaagatgccggtcggtggctacaagcaatcgggtgttggccgtgagaacggcatcagctcgctgaacaacttcacccgcatcaaatcggtacaggttgagctgggcgactacgcctcggtgttctaagagccgggatttgtattgcctgtgaggccgccatcgggggcaagccccctcccacactttgatttgcgaatacattcaaaaatgtgggagggggcttgcccccgatgaggcccgacctgaccacacatcaaagagggtgcatccaatgtcccaagaatacgattacatcattgtgggtgccggctccgccggtaacaccctggcgacccgtctgaccgaagacgaaggcgtcaccgtcctgctgctggaagccggcggcccggactaccgtttcgacttccgtacccagatgccagccgccctggcgttcccgctgcaaggccgccgctacaactgggcctacgagaccgatccagagccgcacatggacggccgccgcatggaatgcggtcgcggcaagggcctgggcggttcctcgctgatcaacggcatgtgctacatccgcggcaacgccatggactacgacaattggtcgaagctgccaggcctggaagactggacctacctcgactgcctgccgtatttccgcaaggccgaaacccgcgacatcggccccaacgactggcacggcggcgatggcccggtcagcgtgaccacgcctaaagccggcaacaacccgctgttccacgccatggtcgaagccggcgtgcaggccggttacccgcgtaccgaagacttgaacggctaccagcaggaaggcttcggcccgatggaccgtaccgtcacgccgaacggccgtcgcgccagtaccgcacgcggttacctggacaccgccaagaagcgttcgaccctgaccatcgtcacccatgccctcaccgacaaagtgttgtttgaaggcaagcgtgccgttggcgtgcgttacctgatcggtgccgccgaagagcgtgttgaagcccgcgcccgtaaggaagtgctggtgtgcagcggcgcaattgcttcgccgcaactgctgcaacgctccggtgtcggcccggccaaactgctggaaagcctcgacatcccggtggtccacgacctgccgggcgtcggcgaaaacctgcaggaccaccttgagctgtacctgcaatacgcctgcacccaaccggtgtcgctgtacccgtcgctgctctggtacaaccaaccggccattggtgccgagtggctgttcaacggcaccggcatcggcgccagcaaccagttcgaagcgggcgggtttatccgcacccgtgaagagttcgaatggccgaacatccagtaccacttcctgccggtcgcgattaactacaacggcagcaacggcgtaaaagagcacggcttccaggcacacatgggctccatgcgctcgccaagccgtggccgcgtccagctgaagtcgaagaacccacgggactacccgagcatcctcttcaactacatggccaccgagcaggactggcaggaattccgcgacggcatccgcctgacccgtgaaatcatgcagcagccggcgctggacccctatcgtggccgcgaaatcagcccgggtatcgatgtgcaaaccgatgagcaactggacaagttcatccgtgagcacgccgaaaccgcgttccacccgtcctgctcgtgcaagatgggcaccgacgaaatggcagtagtcgatggcgaaggccgcgtgcatggcatgcagggtctgcgtgtagtcgatgcgtcgatcatgccgatcatcaccaccggcaacctgaacgcgccgacgatcatgatcgccgagaaaatcgccgacaagatccgtggccgccagccattgccgcgcagcaccgccgactactacgtggcaggcgacgcgccggtgcggggcaagccgctgcgtgaagtgggccctaccgcgcagtaacggatacaccgcggtgttcccatcggaggcaagccccctcccacatttttgaccgtgtgaacccgatcaagtgtgggagggggcttgcccccgaagaggcccgaccagtcactgcaaaacccctccttgatcagctactctgtctgcctgcccgcgacgagccgcccacaaggaaggccccatgttcgatcaccacgccacactcaaacagcatttcagtgccctgcgcacccgtgccgaattcttttcgctgcgttatgtacgcgaatccggccaatacctggccgtacgcaagaacgtcgccgaaccgccgcacctgagccacgacgagggcgccatgctcaccgtgcgtctcaacggcgtggaagcctacgccgcgaccaacgatatttccctggccggcctgcaagccgcccttgagcgtgccgaacagcaagcccggcaaatcttgccccacgccctgctcgacctgcgcgagcaacacgtctccagtgacgtcgccgattacctgtcgcccaaccttcaacagcccttcccatccctgagcgattgctaccagttactcggcagcgaatcggcctccgtgccgaaggacgagcgcctggtgagctgggaagtcagcctgggcctgacccacgtcgagcagatctacctgaacaatgccggtgccgagttgcgccaggcccagcgctttgtgttccccggcgtcaacgtcaccgcctacgatggcaatgacagccagacccgcaccctcggcggcagcaacttcggccagcaaggcgggttcgacgtaatcagccgcttcggcctggtcggtgccgcgccacgcatcgccgacgaggccctgcaactgctggccgcgccgaacacgcccagcggcccgcgtgacctgctgctgatgcccgatcagatgatcctgcagatccacgagtccatcggccacccgctggagttggaccgcatcctcggcgacgagcgcaattacgccggcaccagttttgtgaaggccagcgacttcggccacctgcaatatggctccccgctgctgaacgtgaccttcgacccggacattcccgagcagctcgccagctacggccacgacgacgaaggcaccaaagccagcaaacagttcctgatccgtgaggggctgctgctcaaaccgctcggtggcgcgctgtcgcaattccgtgcgggcatgcaaggcgtggccaacagccgggccagcagctggaaccgcgcgcccatcgatcgcatggccaacttgaatatcgaagcgggcgacaagagcctcgcgcaactgatcggcggtatcgaaaacggcatcctgatgtcgactaaccgctcgtggtccatcgacgatgcgcgcaataaattccagttcggctgcgaatggggccaactgatcgaaaatggcgagttgaaaggcgtggtgaaaaaccccaactaccgggccatttccgcgaacttctggcgcaacctcagcgcggtcggcgatgccagtacgttcaaggtgctgggcacgccgaactgcggcaaaggtgaacccaaccaggtgattcgcgtcggccatgcctcgccggcctgcgtattcagcgatgtcgacgtatttgggggagatgcctgatgaacaacttcaaggcactggtggagtggctcaaacaggccatcaccgacaacgaacaattccacctgggctatgcggatgaagcgtccgagttcgtgcgcttcaaccacgccaaggtgcgccaggccggccaggtgcaacaagccagcctcagcctgaaactgatcaacaatggccgccatgccgacctgggcatcaccttgtccggcgcagcggaactggaccgccaacgtttggccgacggcctgcaacaactgcgcgacaccttgccgttgctacccaaggacccgtacctgctgctgaaccacaacgcctggcaaagcaacaacgaacaaacgcgaccgctgccggacctggcccgggtgttggaagacatcagccaggcggctgagggcgttgatttggtcgggttctacgcttccggcccgatcagccgtggctttgccagctcggacggcgcgttcggctggcaccgcgccaacagcttcaacttcgatttcagcctgttccacgccaatggcgaagcggtcaaggccagctacgccgggcacacctgggacagcgccgagttcgccgcgcgcttccagcaagcccgcgagcaattggaattcctcggccgcccgctgcataagctggcacccgggcagtaccgcgcctacctcgccccggcggcgctggaagaaatcatcagtctcatcacctggggtggtttttccgcccaggccatcgccagcaaaggcagctcgctgcaaaagctgtatgccggtgaacaatccctgagcccgctggtgaccgtcgacgaacagatcagcggctccctgagccaggcgttctccaccgaaggctacccgcgcggcgacgtcacgttgatcaacgcgggcaaaggcgcaggccagttgatcaactcgcgcagcgccgccgaatatggcctgagcaccaacggcgccagcagcgacgagtcccccagcgccttgcagatggccgccggcgacctggcccaggccgatatcctcaagcaattgggcaccgggttgtacatcagcaacctgtggtatttgaactactccgacctgccggcggcgcgcctgaccggcatgacacgcttcgccacgttctgggtggaagacggcgaaatcaaggcaccggtcagcaccatgcgctttgatgacagcgtgtacaacctgctgggtacgcagttggaagccctgaccgctgagcgggaactgctgctctcggccagcacgtacagccagcgcaacacggcctccaacctgttgccgggtgccttggtcaaacgcctgaccctcaccctctaaacacagcagttcccctgtgggagggggcttgctcccgatagcggtgtatcagccaagtattcatcagctgacacgctgcaatcgggggcaagccccctcccacattgagttgtgctgagttcagacatctctgtttcgccccttcctacggttaattcttgtcttccccacctgcacgggcagcctgttgtcgcctgcaaaaaacctcgttataagggttagtggcaccccgccaccccacccacgagagcatgaccttgcccgggaagggcaagctggagcgttgacatgaaccatggaagttttgtcatagaaaagctgttcaagcactacaacgttcatgttgagcagctaggaaacgattcggaaaaaaagaccgtcctgatggtcaacggcgcgctgtccaccacgcgctccttcgcccgcaccagcaaatgcctggccgagcatttcaatgtgctgctgttcgacttgccgttctccggttattcccgcgaacacaataccgacctggacctggtcaccaaggatgacgaggtgcatatgctgcgcgccttggtcgagcgcttccaggtcaaccacctggtgtcagcctcctggggtggcatctcaaccctgctgaccctggcccacaacccgccgtccatcgaaagctcggtggtgatggccctggcgcccaacctcaaccaggccatgctcgactatgtggagcgcgtgcgcgtgttgatcgaagcggacgacaagtcggccgttggccacctgcttaacgagaccgtgggcaaatacctctcgccccggctcaagcgcaacaatcaccggcacctgtcgagcatggccaccaccgaataccgccaggcgcgttttcatatccaccaggtgctgggcttgggcgacggcaattacctgccagcactcaagcagattgaaacaccggtgcacttcctcaacggcgcgctcgacgaatacacccccgccgccgaggcgcaattgttcaagcagtacgtggggcgcagcagctttgccgtggccgaacacaccggccacttgcttgacctcgaatccaacgaagcggccaccgcggtacaccgtgaactgctggatttcctggtgggaaaaagcaccccggttggcgcataatcgccgacacatagccagctaacaaaaaggttctctatgcccaatcgcgtcccgctcgatgccaagaccgcccgctggctcccctgggtggtcgcgattgccttcttcatgcagtcgctggacgggacgatcctcaacacggcattgccggccatggcccgggacctcgcggaaaacccgctgcgcatgcaaggggtggtgatcgcctacatgctcaccgtcgccttgctcatcccggcctcaggctggattgccgaccgcttcggcaccaagaaaatcttctttggcgccatcatgctgttcagcattggttcgctgctatgcgccttgtccagcagcctgaccatgctggtcggtgcccgggtaatccagggcctgggcggtgcactgatgctgccggtcgggcgcttggtggtgctgcgcgcatatccgcgttccgaactggtgcgcatcatgggcttcattaccatccccggcctgctcggcccgctgctcggcccgaccatgggtggctggatggtgcaatacctgacctggcactggatcttcctgatcaacctgccggtgggcatggtcggctgttacgccgtgtggaagctgatccccgacctgcgcggcagcgaacgcacacgctttgatggcgtggggtttctattgtttggcgcggcgatggtgttgatcaccatcgccatggaaggcctgggcgaactgcacctgccgcacctgcgggtgatgttgctgctgttcggcgggctggcgtgcctggcggcgtactggctgcgcgccgggcatatcgacaacccgctgttttcaccggtgctgttcaagacccgcacctttgccgtgggtatcctcggcaacctgtttgcacgcttgggcagtggcgcgttgccgttcctggtgccgttgctgttgcaggtcgcgctgggctactcgccgtccgaagcgggtatgagcatgctgcccctggcggcggcggcgatgtttgccaagtcagtcgcgcgtacgctgatcgaacgcctgggctaccgcatcgtgctcaccggcaacaccctggcgctgggcatcatgctggcgagcatgggcctggtcagcgagcacacgccctacccgctgctgttgtgcatgctggcggtactgggggcgatcaattccctgcaatttaccgcgatgaacaccgtcaccctgatcgacctcgacgacgcccaggccagcagcggcaacagtttgctgtcggtggtggcgcagttgtccctcagcctcggcgtggcctgcgccggtgcgctgctcggcgggttcaccgccgaaaccggtaatgatggggtggaaagcgtactcggtgcgttccaactgaccttcctcaccgtgggcatcatggcgatgctggcggcggcgatcttcctgcaattgtcgccaaatgacggcaaacgagtagtcagccgcgagcacgacatcgagcattaacaggcttctcgtctagaacttgcagggaaattcccacgggactggtacactgcgcgacattttgttttgcagagccagtcccgtgactaccatcgccaccgcttttaatactttgcccctgtccgccgccatgctggctaacctcgactcgctgggttatgtcgagatgacgcagatccaggcgcaaagcttgccggtgatcctcaaggggctggacctgattgcccaggccaagaccggcagcggcaagaccgccgccttcggcatcggcctgttgaacccgatcaacccgcgctacttcggctgccaggccctggtcatgtgcccgacccgtgagctggccgaccaggtcgccaaggaaatccgccgcctggcccgtgccgaagacaacatcaaggtactgaccctgtgcggtggtgtgtccctcggcccgcagatcgcttccctggagcacggcgcccacgtcatcgtcggcacgccgggccgcatccagcagcacctgcgcaaaggttcgctggtgctggatggcttgaacacgctgatcctcgatgaagccgaccgcatgctcgacatgggcttctacgacgccatcgaagacatcatcagcaagaccccgccgcgccgccagaccctgctgttctccgccacctacccggtgagcatcaagcagctggcctcgaaattcatgcgcgcgccgcagcaagttaaagccgaagcattccactccgacgaccagatcgagcagcgtttctacgaaatctcgccggaagagcgcatggacgcggtgaccaaggtactggcgcatttccgcccagcgtcttgcgtggcgttctgctttaccaagcagcaagtgcaggaaaccgtggatcacctgacctccaagggcatttccgccgttggcctgcatggcgacctggaacagcgcgaccgcgaccaggtgctggcgatgttcgccaaccgcagcacctcggtgctggtggccactgacgttgcggcccgtggcctggacatcgactcgctggacatggtgatcaacgttgaactggcccgcgattcggagatccacatccaccgcgtcggccgtaccggccgtgccggtgagaccggcatcgccatcagcctggtcgccccgtccgaagcgcatcgcgcccaggccatcgagcaactgcagaagtcgccgctgaactgggaccaactggacaacctcaagccgcaaagcggtggcccattgctgccgcagatgagcaccctgtgcatcgctgccgggcgtaaagacaaggttcgaccgggcgatatcctcggcgcgttgaccggtgaagccggcatcccgggtgcccaggtcggcaagatcgcgatctttgacttccaggccttcgtggccgtggagcgcgggatcgccaagcaggccttgcagcgcttgaacgatggcaagatcaaaggccgttcgctgcgcgttcgaatcctgtaacacgatctccccttcaatggagatccaatgtgggagggggcttgcccccgatagcannnnnnnnnnnnnnnnnnnnnnnnnnnnnnnnntgctatcgggggcaagccccctcccacatttgaatgtattccaactcagaacttgtatgaggacaccgttttgcgctcgaccgaagttgtgatcattggcgccggcgccgcaggcttgatgtgcgcgctgaccgccgccgggcgtgggcgcaaggtgatgttgatcgaccatgcgaacaaggccggcaagaagatcctgatgtccggcggtggccgctgcaacttcaccaatatgtacaccgagccggccaacttcctctcgcacaatgcgcacttttgcaagtccgccctggcccgctacacccagtgggacttcatcgcgctggtggccaagcacggtgtgccctaccacgagaagaaactcggccagctgttctgcgataacaaatccagcgacatcctcggcatgctgctcgatgagtgcattcaggtcggcgtaagcctgcacctggacacctcgatccaggaaattgccaggctggacagcggctatcagttgcagaccaccttgggcgagttgcgctgcgaatccctggtgattgccaccggcggcctgtcgatcccgaccctgggcgcgaccggctttggttaccaggtggccagacaattcggccacgaactgctgccgacccgcgccgggctggtgccgttcaccatcaccgaccagctcaaggacttgtgtggcgagttgtcgggtacgtcggtggattgcctggtcagctgcaacggccagagctttcgcgagaacatcctctttacccatcgtggcctcagcgggccggcgattttgcagatttcttcttactgggaatccggcgacacggttgaaatcaacctgctgcccgaccacgacgcccacacctggctgcaacagcaacaagccgagcgccccaacagcgaattgaaaaccctgctgggcgagatctttaccaagaagatggccaacctgctggccgagacgtggttcgcatccaagccgatgaagcagtacacccatgccgaaattgccgacatcgcacaaaaactcggcaattggcagttggtgccggcgggcaccgagggttatcgcacggccgaagtcacgctggggggcgtggacacgcgggaagtgtcgtccaagactatggaatcactgaaaagccctggcctgtactttatcggtgaagtgctggatgtaaccggtcacctgggcgggttcaacttccagtgggcgtgggcttcgggctatgcggccgcgcagtacgcctgaccgcaaaatgtactgagtaccaatgtgggagggggcttgcccccgatggcggtgcatcagtcaacgattgggtgactgacccactgctatcgggggcaagccccctcccacatggaataaattttcctgcccgatgtgatcaccacccttgccgtggcgtccttgatagctcaatttagcggcatcgtcccggaagactccagacttcatgtcatcgacctcgttcaagcagtccctgcggcgcctgtgggcactggataaattcagctacagcattcgggtattcatcgccctcaccggcagcatggcgctgtgctggtaccaggatgaaatgacactgctgatcccgctgttcctggggatcatcgccagcgccctggccgagaccgatgacagttggcaaggccgcctcaacgccctggcggtgacgctggtgtgtttcagcatcgccgcgctgtcggtggagttgctgttcccttatcccttgatcttcgcggtctccctggccctggccaccttctgcctgaccatgctcggtgccttgggcgagcgctatggcgcgatagcctcagcgacgctgatcctgtcggtatacaccatgatcggcgtggaccagcgcggcggcgccgtcagcgatttctggcacgagccgctgctgttggtggccggtgccgcctggtatggcgcgctgtcggtgctgtggcaggcgctgttttccaaccagccggtgcaacagagcctggcgcggctgttccgtgaactgggacggtacctcaagctcaaatcatcgttgttcgagccgatccgccagctggacgtggaagcgcggcgcctggaactggcccagcaaaatggtcgagtggtggcggcgctcaatgccgcgaaggaaatcatcctgcatcgcgtgggtaatggtcgccccggttcgaaagtcagtcgctacctgaagctgtatttcctggcccaggacatccacgaacgtgccagctcgtcgcactacccgtacaacgccctagccgaggccttcttccacagcgacgtgctgttccgctgccagcgcctgttgcgccagcaaggcaaggcctgccagaccctggccgagtcgatccagatgcgccagccgttcatctatgacgacagcttcgccgaagccctgggcgacctcaacgcgtccttggagcacctgcgcatccagagcaacccggcctggcgcggcctgctgcgctcgttgcgcgccctggcggccaacctgtcgaccctggaccgcctgctcggcgacgccagcaaccccgacagcctggcggacgccaccgacagcaacctgctggaccgcgccccgcgcaacctcaaggaaatgtggacgcgcctgcgcacgcagatgacgccgacgtcgctgctgttccgccatgcgttgcgtctgtcgctggcgttgaccgtcggctacggcatgctgcatgcaatccacgcgtcccaaggctactggatcatcctcaccacgctgttcgtgtgccagccgaactatggcgccacgcggcgcaagctcggccaacgcatcatcggcacggccatcggcttgaccgtggcctgggcactgttcgacctgttcccgagccccctggtgcaatcgatgttcgccatcgccgccggcctggtgttctttatcaaccgcaccacccgctacaccctggccaccgccgcgatcacgctgatggtgttgttctgcttcaaccaggtcggcgatggctacgggctgttcctgccacgtctgttcgataccttgctcggcagcctgatcgccggcctggcggtgttcctgttcctgccggactggcaaggccgccgcttgaacaaagtgctggccaacaccctgacctgcaacagcatctacctgcgccagatcatgcagcagtacgccgccggcaagagtgacgacctggcctaccgcctggcgcggcgcaacgcgcacaacgccgatgcggcgctgtccaccaccctggcgaatatgctgatggagccggggcatttccgtaaggaagcggatgtgggctttcgtttcctggtgttgtcgcacaccttgctcagttatttgtcaggactgggcgcgcatcgcgaaacccaattgccggccgaagtgcgtgaacatctgatcgatggcgccggcaagaccctggcggcgagcatcgatgaaatcgccacggggttggccaataagcagccgatcgcgatccagagcgatgccgaggaagcgctggcggcggacctggaacagatgccggatgagatcgatgaagggcagcggttggtgcagacgcagttggcgttgatttgccggcagctggggccgttgcgcacgttggcggcgcatctgatcaaggacaccagcgcggcttaggtcgctatcgggggcaagccccctcccacagttttgatttgtgaacacagtcaacaggtgggagggggcttgcccccgatgaggtccgcacaggcactacatgccatgggccttcatcagccgctcatagctgccgtcggccttcatcttggcaatctcccgatcaaagctggccacgatctgctcatgatcagggttcttcaggctgaccaggatgtgcaggctgttttcactcagcggctggggcaaaaactccaccgcattgcgcacccgtgccgattcacgcgagaggtaatagcgcgccacgtactcatcctccaccgtcaaccgcacccgctgcgccgcgagcatacgcacggccatggcgaagttgtgcaccgggactttctgcaactgcgcatccccatcgaacgccgccgaataggcatagccacgcaccacggcgatgggatagtcgtgcaattgcgcaaggttctggaattcgatgggatcgtcgcggcgcttgataaagcgcacacggttgagcaggtattcacctgagaattggcccagtttcgtacgggcatcgtcgtaccaggcgttgatcagcacgtcataacggccgtcgcccacccccatcagcgcacgggcccagggcacctgctcgaagtcactggcgtaacccgcacgggccagggcggtactgacgatgtcggtggccagcccgccattgatcaaggtggcatcggtaaagggcggccaggcatctgccaccagacgcagacgctgcgcgaatgccggctgggccagcagcaacactccaatcaaagcaacggcacgagagaatcgcggcatgctcaaagtccttggcaggcaggcggtggccttggctcaggcgcggcccgaggttctaacagtagctcagattacacaaagaaaccggtgccgaacgcactcaatgatggcaaattgatttcactcacaaaaatagttgatttagacagcgttgcccgctgcgcttactatccgcaacagacattgataagagaactcgccatgaccgttgaatgggtgtgcaaacaccacgatgacctgggcaaggagcagctttacgcgatcctgcgcttgcgcaacgaggtgtttgttgtcgagcagaaatgtgtgtaccaggatctcgatgggcaggatttgtcaggcgacacccatcacctgatggcgtggcaggacgaccaactggtggcttacctgcgcctgctggacccggaatcccagggcggcgacgtggtgatcggccgcgtgatcgtagcgccggtggcgcgcggcaccgggctggggcatcggatgatggaagagacgctcaagcagattgccgatatctggcctgagacaccgatgttcctgtcagcccaggcgcatttgcaggggtattacgggcggtatgggtttgtggtggcgggtgaggaataccttgaggatgatattccacacatcggcatgcgaaaggatcaggggtagcccagcacctgcttgatctggccgaggttcgcctcgatccaacgccgatcaatcgcgccccagctgcgaatccgatagtgcccggcatggttgcgggcaccgtcttcctgctcgaactcacacacaatatccagatcggacaatgccgcaatcgtgtcctgcgccgtgcgccggggcatgccggtggcgtcggtcagggccgggacgctgctggcctggccgctgtcgatcaggtaggccacgtacaggcggcggtagaagctgctcttggtcttgctcacatccatggtcggttgccttgtgcggtcagggtttgcccagcaggtcgcggtacgtgaggtacacccgcaggttgaattccacctgatggtagcccggcatcatgtactcgcagagtttgtagaacgccttgttgtggtccgattccttgaagtgcgccagttcgtggaccacgatcatgcgcaggaactgcggcgcggcctccttgaacagcgcagcaatgcggatctctttcttcgacttcagattgccgccctgcacccgcgagatggtggtgtgcaggccgagggcgcgatgagtcaggtccaggcgattatcgaacagcaccttgtcgatggccggcgcattgcgcaggtgttcctgcttcaaggccagcgcgtaggcgtacagggccttgtcgctctgcaccgcgtggcgttcggggtaacgttgctccaagtaggcacccaactgatccttggcgatcagctggcgcacttgctcctggagggcggcgggataggcctggaggtatttcagcgcggtcatgggctctgcaacagggttcggatggccgccagtgtagcgaattcagcgcaggcgagcgtggcaccagtgtgccacttcctcagccatcaacggctgcgccgccatcgggccctgaatgaatgggcaaccattggccttgagccattgggcctgctcctgggtttccaccccctcggccactaccactacatcaaaatgcttgcacaactcgataatgctgcgcgccatcacctcatcgcgcaccgagcccggcaggcgagcgaccaattgcgggtcaagcttgagggtatcgaaggccaggtcgcgcagatgcgccagggaacaattgcccaagccaaagtcatccagggcagtgcgcacgccgatctggcgcagcaacttgagctgcttgaccgactcatcaaggttgctcatcaggcagtcttcactgatttccacctccagttgccgcccctgcagcccatgtcgctcaagcacctgctgcagttggctcgccaggttgggcatgttgaactggttgctgctcaggctcacgctgagcaccagttcatcgtcgaagccggcgtgccaggcctggagttgggcgccgacttgttggtaaatccaggtgctgagctggctgatcagccgggcttcttccagcaatggcagaaacagaccgggcggcacatcgccgacactcgggtgctgccagcgcaatagcgcttccacaccgcgcacacgcccgtccgccaacgccacctgcggctggtacaccagggtgaactccttgttttgaatcgccgtgcgcacgctgtcttccagcatcaggcgcgaacgggcgcggccattcatttcctggtcgtaatagcgatattgctgacggcctgcgcgcttggcttcgtacatggcgatgtctgccgcgcgcaacagaccgttaatgtccgagccgcaatccgggaaggtggcgataccgatactgacaccgagcatcacatccaaaccttcaacttgctggcagatagacacccgttcgatcagtttttctgcaattttcgccgcctgctcggggaactccagctccagcaacgcggtgaactcatcgccgcccatgcgccccagaatgtcataggaacgcaggcagccctgcaactgctccgatacccagcgcagcacacggtcgccggcgtcatggccaagggaatcattgacccgcttgaagccgtcaaggtccaggtacagcagcaccagagactgctcgttgcgctcgctgcgcagcaaaatgttttcagccgcctggtaaaacccgcgccggttcaacagtccggtcagcgggtcggtgaccgcctggaactccaattgttgatgcaggtgacgcacttcggacatgtccagcacggtcaccaccatggccttctgttcggccggcagcggcgcgcacgacaacgccaccggcacctgctggccgcggctggtccgcaggatcgcatcgtgcaagcgccaggtctggccctggcggtaagcgaggaacatctcgaaccccagccaggccggtacatggggcttttgcaggaagctcaggaaactctcgcctcgcaactcggccagggtagcgttcaacagccgcgaaatggccgggttggcatactcgatcacgctgccctcgcccaccaccaggatgccttcggcggcgttgtccaacaccgaggcattgaacgcccgcgccgactccagctcatggctcaggcgctgcaaggcccggcgattgcgctgatgttccagcaacgcctggaccttgggtttgaggatgtgcgggtcgaacggtttgaacaggtagtcgatggcgccactggcatagccttcgagtactgcggccggcgactgggcgtgggccgtgaggaaaatgatcggtgtcatgcgcgtgcgctggctgccgcgcatcaggcgcgccacctcaaagccgtccatgccgggcatcttcacgtccagcagcaccaggtcgacttcatgtttgagtaacaactcgagggcttccacaccggacgcggcggtcaccacatgccagtcttcacgctgtaacagcgcacgcatgctaagcaggttctccgggtagtcatcgaccacaagcagaaccgaatgaccatcgccgtggtgtggagcgcattccatgctacgtctcttccttaggactactccggtcatttctgacagaaaacccggacaaacactgaggcctcactctagccccggttcagaaaaagcagaagtaacctcagtgccatcattgcgccaatcttcaggaagccgactaacggtcaaccgctacaagccacgaaccatgggaaacatggctttttggcattcctttggcgccaataaatcgccagcaatgatttaacaagatggttaacaccacctataaagaacctgtctggcccaagggccatagcctacacccctctgtaaaaaggcctacgccatgatcgacctatccacctggaacctcagcatccctgtcggctctccgcccgcgaccatcgaaaccccaagattgatgagcggcttcaacgaccaatatttccaggccgaaggcagcaacgtccaattctggaccccggtcaccggcacccgtaccgagaacgccatttacccgcgcagcgaactgcgcgagacctacgccgatgggcgcctgcgcaactggacctatccggatgcggacaacttcctgcgtgccaccctgtccgtcaaccaagtgccgtcctccggcaaaatcgtgatcgggcagatccacgcctatgacagccagaaaccgctgatcaagctggaatatcagttcaaggaaaagacccagaccggcaacatcgtcgccaaagtacgcatgcgcccggatgaggatgaagggcgcacgatcatcgtcgcctccaatgtgccgctggagaagagctttacctatgtgatcaacctcaacaaagccgggctgctcagtgtgtatgccgcggatggcgagtggaacgaacgcatcggcgcggcgtggggcgccaagccgttgtacttcaaggccggggcgtatgtgcaggacaacagtggcaacagcaaggaaggggcgcgggtgacgtttgccaaattagatattgatcacgagtaaggttatttcaatcatcccccgctacggcgggggaatgattacttggatataacgaactccgaagatcgtcttaccgctatagcaaaacagcataaaaattactatttcttgcagtgtgcctattagggcatacctcataaaatcatgtgcgtccaactcatgaaccgttcaggagttaaacacatgccaacgctagccaccattaaccaacctgccgtctcggggttcggcaccgggtcgcaaccaaaaatatacaatgccaccccaccgggttcttttgcgacgccgccccaaaacatgccagttgtcaccaggcccttcagatatctggtcttgtcgcacttattgagcaacaacaccaggattggcgatgtgctgacttattattgctaccctgtgccgtccgcaggtcttcctaccatgcttctggaacaaataacgcttaccgccgcgctgctacaatcttatatcaacaataaacgcgaacattttgagaaggaaatacaatgctaccttccaaacccaggaacctatgacgtttactgggagcttgaaaatgcatctcaaacatatacggagataggacagaatctgagatttacagtggtataactatagtaagcacaaagttggcttatttaatacctgaaaaactactgcgttacccacaatgaaaactactcactgtccttaggcaactactttacacctataaaaaacccgcatttctgcgggtttttttggcgctattggcttagttcaccttagcgttcaactcacctttcaaataccgctggtacatcgcttccaacgagattggcttgatcttcgaagcattgccggcagtaccgaacgcctcataacgcgcaatacacacatcacgcatcgcggtcacggtggcgccgaagaatttacgcgggtcgaattcgctcgggttggtggccatcaggcgacgcatcgcaccggtggacgccaggcgcaggtcggtgtcgatgttgaccttgcgcacgccgtacttgatgccttcgacgatttcttcaaccggcacgccgtaggtttctttgatgtcgccgccgtactggttgatgatcgccagccactcttgcgggaccgaggaagaaccgtgcatcaccaagtgggtattggggatgcgcttgtggatttccttgatgcggtcgatggccagcacgtcgccggtaggtggcttggtgaacttgtaggcgccgtggctggtaccgatggcgatggccagggcgtcgacttgggtctttttcacgaagtcggcggcttcttccgggtcggtcagcatctggctgtgatccagcacgccttcggcaccgatgccgtcttcttcgccggccatgccggtttccagggaacccaggcagcccagctcgccttcaaccgaaacaccacaggcgtgggccatggctacggtttgctgggtgacgcgtacgttgtactcgtagtcggtcggggtcttgccgtcttcgccgagggagccgtccatcatcaccgagctgaagcccagttggatggaacgctggcacacgtcagggctggtgccgtggtcctggtgcatgcacaccgggatgtgcggaaattcttcgattgcggcgaggatcaagtgacgcaggaacggcgcaccggcgtatttgcgggcaccggccgaagcctggacgatcacgggggagtcggtcttgtcagcggcttccatgatggcgcgcatctgctcaaggttgttgacgttaaaggctgggacgccgtagccgaactcggctgcgtggtccagcatttgacgcatgctgataagtgccattgtgttgtctctcccggtcgagggtcgttaatcgtgcaagcctgccgtagcggcggctgctattcaagttattgcagaccaggctttacacacctggcttgctgaatcgttattgctgtcaggcttactgcgctttgcagccacgcccgatcaaatcatcggtggcgacccagtaaaccaggccttcctcaccttttgtgtgaaacgccaattggccgtcgctgtacagcacgcccgaggcggcaacgtcctgcttgaggcggtaaacctggtcggaaccgcccaaacggacatccacctcggatttggcctgattagcaaagcgccagttcacctcagccttgctgtcgcaggtccacgtggtccacttgtcggcagtttctgccttgttgctgaacatgttcatgctgctgcagccggccaacagggccagggctgccagggcgaaaacgcctttcattgccaatcctcgtgaggcgaccgacggccgccagttgatcagacccatcaagggcaaccctgttcctgaccgttgggcgcggcgtcgtatttctccagccgttcgttgccgatgcgcttgttgatcaccggcatggtctcggcttgccagtcggcctggtagcagctctttttctgcccgggggcaggttcatctgccgcagacttcgcgttcggcgtgctgccgcaaccggccaacaggcccgctgcgatcaccaatgccaacgacttgatcatgggaatactccttttccggatcacgagcctcagcctttggctcgggtttccagcacttcaacggctggcagtaccttgccttcgacgaactcgaggaacgcaccgccaccggtagaaatgtaggagatctggtcagcaacgccatatttatcgatagccgccagggtgtcgccgccgccagcgatggagaaggccgagctttcagcgatggccttggccagcactttggtgccgttgccgaactggtcgaattcgaacacgccgaccgggccgttccacaggatggtctgggaggctttcagcagctcagcaaagttggccgcagtttgcgggccgatatccaggatcatgtcgtcggcagccacgtcagcgatcagcttgacagtggcttcggcgctttcggcgaactccttggcaacgacgacatcaaccggcagcggcacgctgactttggcagcgatggcacgagcagtgtcgagcaggtccggctcgtacagggacttgcccaccgggtgaccggcagccgccaggaaggtgttggcaatgccgccgccgacgatcagctggttgcagatctggctcaggctgttaagcacgtccagcttggtcgacaccttggagccagccacgatggcagccatcggttgcgccggcgcgcccagggccttgcccagtgcgtccagttcagcggccagcagtgggccggcagccgcgaccttggcgaacttggccacgccgtgggtcgaaccctcagcacggtgagcggtgccaaatgcgtccatcacgaacacgtcgcacagcgccgcatattgctgggccagttcgtcgctgttctttttctcgcccttgttgaagcgtacgttttcgaacaacacgatgtcgccagctttgacgtccacaccgcccaggtagtcagccaccagcggcacgtcgcggcccagggccttgctcaggtaatcggcgacaggcttgaggctgttttcggcagagaactcgccttcggtcgggcgacccaggtgggagcagaccatcacggccgcgcctttttccagggccagcttgatggtcggcagcgaggccaggattcgcgcatcgctggtgacaacaccgtccttgactgggacgttgaggtcttcgcggatcagtacgcgcttaccttgcagatcgaggtcggtcatcttcaacacggtcatgggtcgcagttcctgaattactgttgatgaggttgtttagaggcgatgtgcagataatgttccgcaacatccagcattcggttggcaaaaccccattcgttgtcgaaccaggccaggatgttcaccagcctcgggccggaaacgcgtgtctggctggcatcgacaattgccgaatgcgggtcatggttgaaatcgcaactggcgtggggcagctcggtgtaggccagcaaacctttaagcgggccgctggtggcggcgtcgcgcaggatccggttgacctccgtcgcatcagtgtcactgacggtctgcatggtgatgtccaggcaggacacgttcaccgtcggcacccgtacggctttggcctggattcgcccggcaagttccggcaacagtcgctcgatgccccgggccaggccggtagacaccggaatcaccgattggaacgccgaacgcgtacggcgcaggtcctcgtggtgataggcgtcgattaccggctggtcgttcatcgccgagtgaatcgtggtgatcgacacatagtccaggccgatcgcctgatccagcaggcgcaacaacggcacgctgcagttggtggtacaggaggcgttggacaccagcagttcattgccggtcaggcaatcctggttgataccgtagacgatggtggcgtcgacatctgcctcgctggccatcggctgggaaaacagcacgcgtggcgcgccggcgtcgaggaaacgctggccatcggcacgggtgtggtagacaccggaacattccagcaccaggtcgacgcccaatgccttccagtcgatggcttcgggggtggcacagcgcaacacctgcacgcagctgccattaatgtgcagacaatcgccctcgacccgcacttcgccggggaaccggccgtgggtggagtcaaagcgtgtcaggtattcaatgctggccatgtcggccaggtcgttgatcgcaacaatttcaaacccggccgccgcccctcgctcgaacagagcacgcaagacgcaacgaccaatgcggccgtagccgttgagtgcaactttgtagggacgcggttgaggcatggggttctcgatcaagggtagttcggtgttgaaagcaccatcgccatcgcgggcaagcccgctcccacattnnnnnnnnnnnnnaatgtgggagcgggcttgcccgcgatggcgccagtacagacaacgcagactgacttagtcttccagcagctcttcagcctggcccaggatgttttccagggtgaaaccgaactcttcgaacaacgctggcgccggcgccgactcaccgtaggtggtcatgccgatcacgcggccttccaggcccacgtacttgtaccagtagtcggcgtgagccgcttcgatggcgatacgcgcgctgacctgcaacggcaataccgactgtttgtagccggcgtcctgggcttcgaacacgctggtgcacggcatcgacaccacacgcacgttgcggccttgggcggtcagcttgtcgtacgcctggacggtcaggcccacttcggaaccggtggagatcaggatcagctccggctcgccgatgcagtccttgagcacgtagccgccacggctgatgtcggcgatctgtgcgtcggtacgtacctggtgttgcaggttctgacgcgagaagatcagcgccgaagggccgtccttgcgctcgatggcgtgcttccaggccacggcggactccaccgcgtcggctgggcgccagcaatccaggttcggcgtggtgcgcaggctggtcagttgctcgaccggctggtgcgtcgggccgtcttcgcccaggccgatggagtcgtgggtgtacacgtggatcacgcgcttcttcatcagcgcagccatgcgtacggcgttgcgcgcgtattccatgaacatcaggaaggtcgcgccgtaaggcaccagaccgccgtgcaaggacacgccgttcatgatggcgctcatgccgaactcacggacgccgtagtacatgtagttgccgctggcgtcttcagccgagacacctttgcagcctttccacagggtcaggttggaaccggccaggtcagccgaaccgccgaggatctccggcagcaacgggccgaaggcattcagggtgttctggctggctttacggctggcgatggtctcgcccttggccgcgacttcggcgatgtaggccgaggctttttccgagaagtcggcaggcaggtcaccggccaggcgacgtaccagctcgttggccagctcagggaattcggcggagtaggccgcaaaacgctggtcccactcggcttcggtggccaggcctttttccttggcgctccactcggcgtagatgtcggccgggatttcgaacgggccgtggttccacttcagcgcttcacgggtcagggcgatttccgcgtcacccagtggggcgccgtggcagtcttctttgccctgcttgttcggcgagccaaagccgatggtggttttgcagcagatcagggtcggctgtgcgctcttgcgggcggtgtcgatggcggtcttgatttcttccggatcgtgaccgtcgacgttgcggatcacctgccagttgtaggcttcgaaacgcttcggggtatcgtcggtgaaccagccttcgacttcgccatcgatggagatgccgttgtcgtcgtagaaggcgatcagcttgcccaggcctagggtgccggccagggaagcgacttcgtgggaaataccttccatcatgcagccatcacccaggaatacgtaggtgtggtggtcgacgatgtcgtggccaggacggttgaactgcgcgcccaggactttttcagccagcgcgaagccaacggcgttggccaggccttggcccaggggaccggtggtggtctcgacgcctggggtgtagccgaattccgggtggcccggggtgcgactgtgcagttggcggaagctcttgaggtcgtcgatggtgacgtcgtagccggtcaggtgcagcagcgaatagatcagcatcgagccatggccgttggacagcacgaagcggtcacggtcggcgaacgacgggttgctcgggttgtgtttcaggtagtcacgccaaagtacttcggcgatatccgccatgcccatcggggcaccgggatggccgctgttggctttttgcacggcatccatgctgagggcacgaatggcgttggcacgctcacgacggctgggcatcgctgatctcctgaggtttgaatataaaagaaacggaaaaaaggaccggcattttccctcagccaccgcctgcgggcaatgacagatagtcacttgagggtgtttttcctgtgctttgggcaccaatcgcttgcagaaacctttaaccggttcgtctaaaggttatagcggccgcttataaccgccacttatcgatcaatatcaaaactttttgatattggccttgcgagcctgtcgccccatcactagactgctggccttatgaatctacccatgccctcactgcgtgccgacgacggcgatgaactggcagccttgtgcaaggccgctggcgacccgctgcgtctgaacgtgttgcgcgcgctggccaacgattcctttggcgtgctggagctggcgcagatcttcgccatcggtcagtccggcatgagccaccacttgaaggtattggcccaggccgatctggtggcgacccgccgtgaaggcaatgcgattttctatcgtcgcgccctgccccacaccgaactgctgggcggcaagctgcacaccgccctgctcgaagaggtggacaacctgagcctgccgcttgatgtgcaatcgcgcatcggccaggtccacgggcagcgcgccgctgccagccaggactttttcgcacgggtggcagagaagtttcgtgcccagcaggacctgatcgcaggcctggctcaataccgcgacagcgtactggcgctgctggacaagctgagcttcagtgacgaggccacggcgctggaagtcggcccgggcgatggcggtttcctgccggaactggcgcggcgctttcaccaggtcacggcgctggacaacagcccggcgatgctcgacctggcacgccagctctgcgagcgcgagtcgctgggcaatgtccgcctgcaactggccgacgcactgagcagcacgacaatcaaggccgactgcgtggtgctgaatatggtcttgcaccatttcgccgcccccgccgaggccctgaagcaaatggccgggctgctgcaccccggcggtagcctgctggttacggatttatgcagccacaaccagaattgggccagggaggcctgcggtgatctctggttgggttttgaacaggatgatctggcccgttgggccaccgctgcgggactcgttcccggggatagcctctatgtaggtttacgcaatggtttccagatccaggtccgccattttcagcggccggctggcgacactcaccatcggtaaatatcaggaaaacatcgagatgagcgaatactcccttttcacctccgagtccgtgtctgaagggcatccggacaaaatcgccgaccagatttctgatgcggtgctggacgccatcattgctgaagacaagttcgcccgtgtggcgtgcgagactctggtgaaaaccggcgtagcgatcatcgcgggcgaagtgactaccaccgcctgggttgacctggagcagatcgttcgtgacgtgatcaccgacatcggctacaccagctccgacgtcggcttcgacggcgcgacctgcggcgtgatgaacatcatcggcaagcagtccccggacatcaaccagggtgtcgaccgcgccaagccagaagatcaaggcgccggcgaccaaggcctgatgttcggctacgccagcaacgaaaccgacgtgctgatgccagcaccgatcaccttctcgcaccagcttgtgcagcgtcaggcagaagcccgcaaatccggcctgctgccgtggctgcgcccggacgccaagtcccaggtgacttgccgttacgaaggcggcaaagtcgtgggtatcgacgcggttgtactgtcgacccagcacaacccggaagtttcctacgccgacctgcgcgaaggcgtcatggagctgatcgtcaagcacgtgctgccggccgagctgctgagcaaggacacccagttccacatcaacccgactggccagttcatcatcggtggcccggtgggcgactgcggccttaccggtcgcaagatcatcgtcgacagctacggcggcatggcccgtcacggcggtggcgcgttctcgggtaaagacccgtccaaggttgaccgctcggcggcctacgctggtcgttacgtggcgaagaatatcgtcgcggccggcctggctgagcgttgcgagatccaggtttcctacgctatcggcgtggcccagcctacgtcgatctcgctgaataccttcggcaccggcaagatcagcgacgacaagatcgtcaagctggtgcgtgagatctttgacctgcgcccttacgcgatcaccaccatgctcgacctgctgcacccgatgtaccaggaaaccgcagcgtacggccactttggtcgtacccctgcgcagaagactgtcggcgacgacaccttcaccaccttcacctgggaaaaaaccgaccgcgccaacgacctgcgtaccgccgccggcctgtaaccgctcaaggtgtacaaaagcctcgccgggtttgcccggcggggctttttattgcaccgcacgttgcgcgacgcccctcacattttttggatccaatgcttgcaggcccaatgatggccctctagaatccgcgccctctcgggcctctcaccttatttggatattgccctgcgccagcccgggagtcccaagcgtgcaggcaatcgaacattgaggtttttcatgcgcatctccacgctcgcccccgccgcccttctgctcagcctgttcgccctgccggcccacgccgccgacctgagcgcactgagcggcgccctgagctcgcagctcggtggcggcaattccggcgactgccagaagcaagccgcagacctgcaaaccaagatcgatgcagccgaagcccagaaggacaccttgaaagtgaaggccttcaaggccgcgcaagaccagatcaacaaaggctgtgacaaactttccgaagcgcaggccaaagccgatgccaagcagcaaacacaggaagccaaggccgataaacctgacgcggtgaaagccctgggcggcctgttcaagtaaacagaaacacccggtaaaaagccccgcactgccggggcttttttgtggccgcagggttccattaggctgggcacccttttcgagcaaggatgctcatgatgcgtctactgatggcccttttactcagtattttaccgttcagcctatgggccgaagattgccccgacgatgctcgggcccaggtcagcaccctggccaaacaaatccgccagtgggatgacagctaccaccggctcggccaatcccctgtgagcgatgaactctacgaccaggcccgcctgcgcctggcccactggcgccagtgcttccccgacacccctttgacgcccgacaacccactggcgagtgcacgcggtacccggctgcatcccgttgcccataccggcctggagaaactgctggatgaacaggcagtcgctgcctggctggccacccgcgaggatgtctggattcaaccgaaggtggacggtgtggcggtgaccctggtgtatcgcaaggggcgcctgagccaagtcatcagccgcggcgatggagcaaagggccacgactggtctgcctccgcgcacaaaatccccggcatagtccagcagttgcccgagcgcatcgacctgctgctgcaaggtgaactctattggcgcctcgatggccatgtgcagtcggccaccggcgggctcaatgcccgtagcaaggtggccgggctgatgaaccgcaaacaattgagcgacaccgacgccgcaggcattggcctgttcgtctgggcttggccgaaagggccggcagcgtttaccgagcgcctggccacactggaacgctggggcttcaccgatagccgacgctacagccaccccattcgagacatcaccgaagccgcgcattggcgcacctattggtacaaccatccattgccgttcgccagcgacggcgtggtgctgcaccaggcgcagcgcgcacccgccgaacgttggcaggtcgttgcgccgtattgggcgactgcatggaagtacccggccgccaaagccctggcactggtgcgcaacgtgcagttcaagatcggccgcaccgggcgcatcacccccatgctggaactggagccggtacgcttggacgaccggaaaatcagccgggtaagtgtcggctcattggcacgctggcaagcgttggacatccgacctggcgaccaggtctccatcagcctcgcgggccaggtgattcctcggttggacgcggtcattctgcgcagtaccaccagggtggacctgccagtgcccaaccctggcaaattccatgcgatgagctgctggcaactggaccccgattgcgaggaacaattactggcacgccttacctggctcagtggcaaccagggcctcgcgttgccacacataggtcgcgagacctggaacgtattgatccaggccggtctaatcgcaggctttctcgattggttaaccctggacgcggcagagcttgctaacattgatggcttcggtgatcgcagccgcgaacgcgtgctcgaaagccttcacagcgctcggcagcggccctttgcacaatggctcaaggccctgggtgtaccgcctgcggcacgtaataacctggagggcgactggcagacgctggtcgccagagacacccaggcctggctgaacattgatggcatcggcccgggccgcgcagcgcaactgagcgctttttttcgcgacccgcacgtacaggccttggctgaatcattacgcatggcggggatagacgggttttgaaccccgctgcccccgccatcagattgcgactttggagccccacatgaaatttctagccccttttgccttgctgaccgtcgcaagcttcatgaccacaccgttgctggccgctgaacaagccgcccccctcaccggctgcgccgccaaacgccaagccatcagcatccagatcgaacaagccaaggcccacggcaacagcgcgcaacaagccggcctggaaaaagccctgagtgaagtcaccgccaactgcaccgacgcctccctgaagaaggagcgtgaaaacaaggtgctcgacgccaagcacgaagtcagccgccgtcaggccgacctcgacaaggccatgaaaaaaggcgacgcggacaagatcaacaagcgtaaggataagctcgccgagtcccgcaaggaactgcaggacgcggtggaagagctcgaccagtaaaaccggtcagtggtcacggaactgtttatggcaggcgctgcaggcatcttcgactttctgcaccgccggccccaggttactggccttgtagggctgcacttggctggcagtcaccaattcgccggtggccgcttcaaggttgcgggccagttgctggaattgcgcctgtttctgccagacatcgtccttggcgctggtgtgatcttcttcgcgcacgcttgggaaatgtttccaaggctcatgggacaaggcgtccagcttgaccgcaccctcggcaaatttggcgccgtcgaacgggatgcgcccacgcaacatgccgcccaggtcttcgccggtcttgagcatctgtttgaagattgccttgcgctggcccagcggcgaattcggatcaacaccgccacaggcggacagggccaggcaggccagcagtacaacagtcagtcgtttaaaagtcatggtggcttcgaggtcacgggaaacggcggccagtatcctcgccccgcccataaagaccaatagccctattaataataagggttgcccaaaggtgttaccgcgcgggcaatcgcttcaggaagtgtttgtatgaatgtaacctttaaaccctggagccgccgcctggcgtgggctctgccgatgatcgcgctgctggccggctgcgacgcgggcaaagaagcagccaaagatgaaactcccaagccccacgccgtcgccacctatgtcagtgcgccgtgggaggcgttgccggcggtgtctgacaacgacctgctggccggttttgaatcctggcgcagcgcctgccagcgcctcaaggcagacccgatctggggcgcgacctgcgcagccgccgctacggtgcccggcaatgccgtggccgtgcgcgggtttctcaaggagcgtctggatgtgttcggcctgcgctcggccgacaacaccccgaacggcttgatcaccggttactacgaaccggtctaccccggcagcctgaccaagaccgccaaggctaacgtaccggtatatggcgtgccggacgacttgatcatcgtcaacctggaaagcatctacccggagctcaagggcaagcgcctgcgcggtcgccttgaaggccgtgtgctcaaaccgtacgacgatgccagcgccatcaacggccagggctctaccgccaaaccgattgcctggctgactgacccgatggacctgcaattcctgcaaatccagggctcaggccggatccaactggccggagggcgccaactgcgcgtcggttatggcgaccagaatggctacccctatcgccctatcggccgctggttggtggagcaaggtcagttgaagaaagaagaggtgaccatgggcgccatcagcgcctgggccaaggccaacccgcagcgcatcccggaactgctggcgagcaaccccagctacgtcttcttcagcgcccgccccgacagtaacgaaggcccgcggggttcactgaacgtgccgttgaccgcaggctacagcgttgcggtggatcgcaaggtgattccgctgggcagcctgttgtggctgtcgactaccaaaccggatggctcacccatcacaaggcccgtcgccgcccaggacaccggcggtgcgatcacgggcgaagtgcgcgcggacctgttctggggcactggtgaggcagcgggagaattggcgggcaacatgaaacagcaggggcagatatggatgttgtggcccaagggcgcagcattgccacaggtgccggatgcacctgccgggacctgaaagcggtctgtccagcttggttcagtggggtgagcggccttgctagtgggcaagcttggcctgttgtggtgagcgggcttgccccgcgttgggnnnnnnnnnnnnnnnnnnnnnnnnnnnnnnnnnnnnnnnnnnnnnnnnnnnnnnnnnnnnnnnnnnnnnnnnnnnnncccaacgcggggcaagcccgctcaccacaacaagcacgctcataacacaaaaagcacgctcaccagcaaagcccacacccacaggggacctgcttcaaccgtcagatcgagacgaagaagaaactcgcaatcaacgccatccccacaaaccacaccagcgaacgcagcatcgcccagtccgccagatagcagatgatgtacagcaggcgactggtgataaacagcacggccagcacattgatggtcaccaattcggccgtaccggccaggtgcgcgataatcacggccgccgcaaacgccggcgtgacttcaaagctgttgagttgcgcactgtgggcccgcttggcaaacccttcgagggtgtccaggaaagcgcgggggtcgtggttctgccgtggtccgaacttgccaccactgaacttggccacgcctgtgcacagataaggcaggaaaattgcgatcaacacacaccagaaggccaccgtcatcactgattccttttttaattttgttttaagttttaaacagaaattagagttttagcactaaacctgtaaaaccgcacccaccgctatgaaccgctgcgctcggaaaggttctatcggtgatttgcccacacgcctgcaacatcgcaccactgttgcggtccatcccccatcgacgctctctccccaacttccaaggaccccggatgctcgaacttgtcgccgcctttatttgccttaccaccctgctcacctacgtgaactttcgctttatcggcctgccacccaccatcggcgtgatggtcacagcgctggtgttttcactgatcctgcaaggcttgagttttctcggctaccccggtcttgaggaacgcatccagcaactgatcggccagatcgacttcggtgatttgctgatgaactggatgctctcgttcctgctgttcgccggcgccttgcacgtcaacctgaacgacctgcgcagctaccgctggcccatcggcctgctggcgacctttggcgtgttaatcgccaccgtggtgatcggcagcctggcgtattacatctttgccttgtttggctggcatgtaagcttcctctactgcctgctgttcggcgcgctgatctcgcccaccgatccgattgcggtactgggtgtactgcgtaccgccaacgcctccaaacccctgaaaaccaccatcgtcggcgagtcgctgttcaatgacggcacggcagtggtggtgtttaccgtattgttgggcatcgcacagctgggcgagacgccaaccgtgggcgctaccgccatgctgtttgcccatgaggccatcggcggcgtggtgttcggtggcctgatcggctacctcgtttacctgatgatcaaaagcatcgagcaacaccagatcgaagtgatgctgaccctggccctggtgatcggaggctcggcaatggccaccgaactgcacgtctcggcaccgatcgcgatggtggtcgccggcctgatcatcggcaacctggggcgcaagctggcgatgaacgacatgacccggcgctatctggacggcttctgggagctgctcgatgacatgctcaacgccctgctgtttgcactgatcggcatggaactgttgctgttgccgttcaactggctgcacgtgttcgccgccagcctgctggccgtcgcgatcctgctgtcgcgcctgctgacagtcgccccagccattctgttgctgcgccgctggcgcacggtgccacgcgggaccatccgcatcctgacctggggtggcttgcgtggcggggtttcagtggcactggccctggccttgccactgggcccggagcgcgatttgctgctgagcatcacctacatcgtggtgctgtcgtcgatcctgctacaggggttgagcatcggcaagctggtcaagcgcgtgacccaggacgagccccaggccacgcctgacactcactgatccttgttgatccgctgcggatgcctggggtccgcagcttttttgctcggcaggctgctttcactgcgaatctgtgcgtgactgatcagtgcaaagataaagctgccgccaatgatattgcccgccagggtcggcccggcgaacaccagccagaagtccttccacggcaactcgccggcaaacaccaggtacgacacttccgccgagccgacgacgatatgggtgaagtcgcccaatgccatgaggtaggtgatcagaatgatgatccacatcttggcactttccatggacgggatcatccacaccatggtggcgatcatccagccggaaacgatgcccttggcgaacatctggccggggtcgttctccatgatcttgcgcccgatctcaaggaacgccatgtcggtcctggtatcgaagatcggcaagtgcagcatcacgtacgccaccagcaaggtgccacacaggttacccaccagcaccaccgaccataaccgcagcaggcgaccggcattgcccagggtgggcttgctcatcaccggcagcacggcggtcagggtgttttcggtgaacaactgctggcgcgcgagaatcaccgcgaggaagcccgcgcagtaaccgaagctggcgatcaccttgaacgcttcgccctccggcagacgggagttgagcaaccccatggccatcagcgacagccccatggtcaagccggccgccagcgccgaccaccacagggcggcaacgctgcgctcaagctcctggtcgccctgggtgcggattatttcatgcagtaccgccgcgcggggcggctggttcttgtccacgtcctgctgctcttcctgcgacaggttgggggtcttgccgtctgtttgagtggccatgatgtaccagagtccgaggggtgcctgtagctacgacacgccacggcgatggctgttcagtggcctgacgactaaaccggtatgcgccaggccttggcggcttccacagtggtagatctgaacggggtgctccagggtttattgcgcgccttgtagtatttgacgatgccttcgagcacgttgttgaacgctggtggtgtcctggcatccgccaagtcacgggccgcacgccgcagcagctcgatattggcctgcggctggccaggccgatagagcgacgggtagatgacttcccgcgtgaagttttcggcctttaccgcaagatcacgcctgctcatctgcgcaaccgcgctcgtcatgactttcgacatcgccgctgtgtcgccaggtgactgcttgctcatcacttgcagaagctgctgaaaattaggcctgccgactgcattgagacgccgccccaaccactcgacatactcgggacgacgcgccagcgcatccagattacgcaacgccgccgccaacctgggagtcaccgtcagcttgtcactggcctgattggcttcggtaatggcggcctccagcgcctgcatcgcttgctgtgcgctcttgcgaaacatcagcacatccttggcggcgggatccttctccagatcactctcaacgctcgccagcattttgtcgtccatggccaacacagcgacgtccaatgagcggaattggtagcgttcacgcaacgcggcacgcgtgtccagatgtgcgctcaccgccgcacgcgccgacgcctgcagatgctttttctgatcgtcggtcatggtgaagttaaccgtgccattgagcaggttacgaaagtcacccttttctgatttcagcggtaacacgacagtctgatccgcttgcgccttgagcttgtcttcctggtacccctcggcagccgcatgcgggacacccatgatcgtatcgaccaggccgctccccacgctacctgccttggcaggctccaggttttcagtttcaaacctgacgaccagtgactcggtcttgcacagggggctttctggaaaaggcggatcaatcaccgcagaagacggcgtattgaccagcagtccaccatccagaaatgccttttgctcagcgtgctcctggaaggcatggccttgctctttcgggcttttgaacaacccaggcaatgagccggatatgtgagccgccctggcaatatccatgtccggggtggtgctggaattgaagaccaccaactgtggtcggccatcgaacagaccggttcccgtgatattgagctgcttgaccgcaggaatgtgacgactcaacacctcaatatcgcgaaaagtcggccctttccctgcactgagccggtccgcaatcttcatgacgtcggcaggccggtcttcccgccgggtcccggcgatctttgccagcagcgacttgcgcgcctcattgccgatcaggtcttccaggggctgcgcttcggtttgcaggcgcggtatcagggtgaacaataattgcgcgatgtttccggccgttcctggcaagcgccctgccaattttccaatttcagtactggcattctgcagctttgcaatcaaaggattcttgctgttcagcaactcaggcaggttgaggccgttcgacaggcgtgcaaaagttttggcatccatgccactggccagcaacacagcagaaattgcgcccgcggatgagccggagatcactttgacgcccaccaacgccttgtggtcttcgagcgcctggaccatgcctgggaacgcaatgcccttggccccgcccccactcaataccagatgtgtgagcggcggcggtgacaaaaccacctccacccggccatcgctggagcgctcaaggctcaccttgcgttcgcctacgcctttgaccagcaatgtctttacatttttttcagcattgtcaggcggctgaggttgagtactggcatgtgggctggacactttcatattcatacgcgccactctctacaggatgtcatcctgagtgacgcgagagcctgggacaggtccatccggaatgatttggtaaagcaaatcgacccggccctcgattactgtggaggagtgtcgtcctcgaactggtccttcacgtacctgatctgagtgcggccatgaggcgctggcaggccatcttcaccaaggttgacgaagaccattttttccacggtgagaatgctgctgcgggtgatcttgttgcgcacttcacaggtcagggtgatggaggtacgaccgaacgcagtggcggtgatgcccagctcgatgatgtcgccctggcgtgaggcgctgacgaagttgatttcggagatgtacttggtcacgacgcgttggttgcccagttggacaatggcgtagatggccgcctcttcatcgatccagcgaagcaggctgccaccgaacagggtgccgttggggttgaggtcttcgggttttacccatttgcgggtgtggaagttcatgttcactccaaagcgtgttgccgaatgatgggcaacatcatggcagaggcccgccccaagctctacgcgccattgcctatcagccccatgagcgatcttcatatggccgacagaaaggcttgggaagtctggcgcacacggctataatcgcccccgcttcaaaacggtcatcttcggttgataccgttctcccgccacctgtccgaggggcgctgcagcaggttcaacctgtcaggctcggatggggcgttgtccggacaggtaccacctggcctgatactaaacgcacaacggcgcccattcgcacactacgaatggaggctcttcatgagcgctgtcaacacgcctgcagatttcaacgactacaaagtcgccgacatgtccctcgctgcctggggccgtcgcgaaacctttatcgccgaatccgaaatgccagccctgatgggtctgcgtcgcaagtacgccgccgagcagccgctcaaaggcgcgaagatcctcggctgcatccacatgactatccagactgccgtgctgatcgaaaccctggttgccctgggtgccgaagtgcgctggtcgtcctgcaacatcttctcgactcaagaccaggccgctgccgcaatcgctgccgccggtatcccggtattcgcctggaaaggcgagaccgaagaagagtacgagtggtgcctggagcaaaccatcctcaaagatggcgcgccttgggatgccaacatgatcctcgacgacggcggcgacctgaccgagctgctgcacaagaagtacccgcagatcctcgatcgcgtccacggcgtgaccgaagaaaccaccaccggcgtacaccgcctgctggacatgctggccaagggcgagctgaaaatcccggccatcaacgtcaacgactcggtgaccaagagcaagaacgacaacaagtacggctgccgtcatagcctgaacgatgccatcaagcgcggcaccgaccacctgctgtcgggcaagcaagccctggtgatcggctacggcgacgtgggcaagggttcgtcccagtccctgcgtcaggaaggcatgatcgtcaaggtttccgaagtcgacccgatctgcgccatgcaagcctgcatggacggttttgaagtggtttcgccgttcatcgacggcgtcaacgacggcaccgccgccagcatcgacaaggccctgctgggcaagatcgacctgatcgtcaccaccaccggtaacgtgaatgtctgcgacgccaacatgctcgccgcgctgaaaaaacgtgctgtggtctgcaacatcggtcacttcgacaatgaaatcgacaccgctttcatgcgcaagaactgggcatgggaagaagtgaagcctcaggtgcacaaggttcaccgcaccggcgcgggcgatttcgacccacagaacgacgactacctgatcctgctggctgaaggccgcctggttaacctgggcaacgctaccggccacccaagccgtatcatggatggctcgttcgccaaccaggttctggcccagatcttcctgttcggccagaagtacgccgacctgtcgccggcccagaaagccgagcgcctgaccgtggaagtactgccgaagaaactcgacgaagaagtggccctggaaatggtccgcggcttcggcggcgtggtgactcaactgaccaagacccaggccgactacatcggcgtgaccgtcgaaggtccgttcaagccgcacgcttaccgttactgataagcctaccacccgccctccttgtgagggcgggctttcaatgtgggagggggcttgcccccgatagcggaatgtcagttaacaaatatgtcgactgatacctcgtcatcgggggcaagccccctcccacattgacggtgtacatctcccggttgtatgagtttcaaagggtattaccatgtcccaagaccgtcgctacagcttcgagtttttcccgaccaagaccgatgctgggcatgaaaaactgatggcgactgccacacagttggccagctacaaccccgacttcttctcctgcacctacggtgccggcggctcgacccgtgatcgcacgatcaacaccgtgttgcagctggaaagccaagtcaaagttcccgccgctccgcatttgtcgtgcgtgggcgacagcaaggccgacctgcgcggcctgctgactcaatacaaggctgccggcatcaagcgcatcgtcgcactgcgtggcgacctgccgtccggcatgggcatggccagcggcgaactgcgctacgccaacgacctggtgagcttcatccgtgaagaaaccggcgaccacttccatatcgaagttgcggcttacccggagatgcatccacaagcgcgcaatttcgaagacgatctgcagaacttcgtgcgcaaggccaacgccggcgccgacagcgcaatcacccagtatttcttcaacgccgacagctacttctacttcgtcgagcgtgtacgagccatgggcgtgaacatccccatcgtgccgggcatcatgccgatcaccaactacagcaagctggcgcgcttctccgacgcctgcggcgccgagatcccacgctgggtgcgcaaacaactggaagcctatggcgacgacgtcaagagcatccaggcgttcggcgaacaggtcatcagcacaatgtgtgaagaattgttgcaaggtggcgcgccagggttgcacttctataccctgaaccaggctgaaccaagccttgcaatctggaacaacctcaagctgccacgctgaaggttgcccggcggtgccaaggccctcgtctacgagggcctttgtcgttttacatgcccacggaacccagcagtccatgaatacagtgcccacgccgtcccgcccacaactggtctacctggtcttcggcgccgagacctaccaccaggaagcggtgttcagcatcgccagtgcgctggctttcctgcaggcaaccccggaagccgccgtggatatccaggtattcagcgacaaccccgagccctatcgcctcttgccggtacgtgtacgcccgctggacgaagctacccgcaaacgctggagcgaaccccacggctatcacttccgtaccaagcatgtggtattgcgccaagtgctggaagaatcgccggtggccatgctgatcgacaccgataccttcttccatcattcaccgatggacctgttcgagcgcgtgcaacccggcaccctgctgtgcaatgccttctacagcaagtacggcgacaaccacgagagcattctctacaccgccttgcgccagcgcctgctggacatgggcgtggccgacgatgaaatgatgacgctcaactccggggtcatgggcctgacgcaacaggatgcgcacatcctcgaccgctccatcgccttgatggacgaattgttcccctatgcccaaggcgcgtacaccctcgaagaattctgcctgtcgatcgccgcctatcgcaccgtcaacgtgcgcgaatgcccggacctgatccaccactactggagtcgcaagcagctgtttcgcgccaaggtcaaggcctggatcgccaagcatgcggccgcgcccaccagcgcactggcgttggccgacactcgcaaggtgtccgcgcacctgccacgccctccccgcctgcagcgtcttctgtacaagctgatcacgctggtgctgcccaagcaccagcagcaattcatccgtgaaattctctacggctgctacgagcatgagaacgagttcgaccaggcgtgtggcccggtttggtgggacaaggcccggcagaacctggaagaacgccagaagcgcccgatcgacactcatcagttggagcactggtttgccaaccccgtggtacgcctgatcctcggcgagcgacgggcagcgatctacgaacacttgatgacctctccgggcaaatagcccggcccgcggatgcgcgtgccagagcttctctttagtgcgggagcgtcgtaacctcagggcatgcccgtcattctgaagttgttgactgccgccctcttcacttgcctgagcctcgccgcttatggcgagaagctgcgcattgtcaccgagccctgggcgccctacgtgtatgaggaccagggcagcatgcgggggctggactatgaaaccacggtgatcgtgttccagcgcctgggcgtggaggtggaatggcagttcctgccctggaagcgctgcctggccatgctcgaccaaggccatgccgatggcgcactggatatctttcacagccatgaacgcgacgccttgctgctgtaccccagcgagccactgtcggaagtggagttcacgctgttctacgccaatgagcgcccccaccccgtgcaaagcctcgaagacctgcgtggcctgaccgtcggcacatcgccgggctatctgtacggcgcagcgttcagcgactcccccctgttcagtcgtgaaccggcaccgagccatgaggccaacttcggcaaattgatgctgggacgcatcgacctggtgatcaccgaccgtcgcgtaggccagcatgtgatcaaggcgctgggcctggaaggcaaggtcagccaggcgccggccgtggtcagccgccaacagcaatttctcgcggtacgccgtagcgcaggcatggacctgctggtacagcgctttgccgccgagctcaaacgcttcaagcaagagccggcctatagcgccttgagtgccaaatatggtggaatccaagccattacggcctccggacgcaccgttgagcagcaggaaagcagcgcacagtgattgctctgttatactccggcctttccgccaggctcacgcccggccgctgaggtcttgaaaaaggcacccaacccgctacagcgcagctttcagcccgcgcgagccggtggagtgcccgccagacgcagcaggaccggacggggttgcgctcccctaagcgccattcacgcccggcaagattatccctttgggccaagccctaactaaaacaggattactcatgtcctttgcttccctcggtctctccgaggctttagtccgcgccatcgaggcagcgggctataccgagcctactccggtgcaacagcgggccattcccgccgtgttgcaaggtcgcgacctgatggttgcggctcagacaggtactggtaaaaccggcggtttcgccctcccgattctggagcggttgttccccaacggtcacccggacaaatcccagcgtcacggcccgcgccaaccgcgcgtactggtcctgaccccaacccgcgaactcgccgcccaggtgcatgacagcttcaagctgtatgcccgcgacctgaagttcgtcagcgcctgcatcttcggcggcgtcggcatgaacccacaggttcaggccatgtcccgcggcgtagacgtgctggtggcctgccccggtcgtttgctcgacctgtgcggccaaggcagcgtcgacttgtcccatgtggaaatcctcgtgctggacgaagccgaccgcatgctcgacatgggcttcgtccatgacgtgaaaaaggtcctcgcccgcctgccggccaaacgtcagaacctgttgttctcggccacgttctcccaggacatcaccgccctggccggcaagctgctgcacaacccggagcgcatcgaagtcacgccgccgaacaccacggtcgagcggatcgagcaacgcgtcttccgcctggccgccagccacaagcgtgcgctgctggctcacctgatcaccgcaggcgcctgggaacaggtgctggtgttcacccgcaccaagcacggcgccaaccgcctggccgagtacctggacaagcacggcctcaccgccgtcgccatccacggcaacaagagccagaacgcgcgcaccaaggccctggccgacttcaaggccggctcggtgcgcatcctggtggccaccgatatcgccgcccgcggcctggatatcgaccaactgccgcacgtggtcaacttcgagctgccgaacgttgatgaagactacgtacaccgtatcggccgtaccggccgtgccggtcgttcgggcgaggccatctccctggtcgcgccggacgaagaaaaactgctgaaaagcatcgagcgcatgaccaagcagaaaatcgccgatggcgacctgatgggcttcgatgccagcgccgtggaggccgagaagccagaagcgcgcgagcgtccggacgtacgcaacccacgcaacccacgcggtccgaagggcgatggcccgaacggcggcgggggtggcggtgggcgtcgcgacaagggcaaagacaagggcaaggaaaaatccgccaccagcggccgtggcgaacgcccagcccgtgagcagaagccccgtgaaggcaccccggcccgcgaacagcgccagccgagccagccgccacgcgccgctgccgaccgtgctccggacgagttcctggatgacgatgtggataacttcggcaaccgcgttgactacgtaccccaggccaagccggcccaaggccgtggccgtcgcccaggtgctccggcacagggtgcgggtgcgggcgctccacgtggcggccagccacagggcggccgtcagaatggccctcgcaacagcagcggcggcaccaccggtacgccgcctgccaagcgcaacggcccgcgcaatggcgcaccccgtgacggtcaggcccgccgtgaagactcgcgcagcaacaaccgccgcccggcccgtgacgaccagccacgcttgtccgaaccagccgtgcagaacccgcgcggtggcccggcgccgaagatcatccacaaggagtcgaaggcagatcgcttcccgacacccgagcagttggatcaactgccaggccgtcctcgtggtgaaaagccagcgctgctgacgcgcaatcgctgagttttatagccccatgaaaaagccccgcatctttcgatgcggggctttttttgtacaggcagaaattacttctgcttgacaccttccagcgagatgtccaggtccacagtctgcgaggacgggcctgggcccttgatgccgaagtcgttcaggttgacggtggtggtggcgttgaagccagcacgctcgccgccccatggatccttgccttcaccgttgaaggtggccttgaaggtcaccggtttggtcacgccgtggaaggtcaggtcgccagtcacatcagcagttttcgcgccagttggcttgactgcggtggacacgaacttggcgtcggcaaacttggcaacgtccaggaagtctttgctggcgatgtgcttgtcacgttctgcgtggttggaccacaggctggcggttttcacgtcgaccgcgattttgctggcctctggcttggcggcatcccagctgaaggtaccgtcccaatccttgaaggtaccgtgaatgtagctgtagcccaggtggctgattttccagtcgatgaaggcgtgctggccttctttgtcgatcttgtagtcagcagccatcacctggcctgcggacagcagggcagtaccgattgccagagcagcgagggtctttttcaacatgctttctattccttgtgagtcgaggttgaacatcaggctttgcgccccagcattcgcgtgagggtcgcatcacgatcgataaagtggtgtttcaacgcagccacgccgtgcaagccggcgaagaccaccagcacccaggccaggtacaggtgcaccaggcccgcgttatctgcctggtccggtagcccggaaaccacggcaggaatctcaaacagaccaaacaccgggataccgacaccgtctgcggtggaaatcaggtaaccggcgatcatcacggcaaacagcccgagataaaggaacgcgtggccaaaggccgcgccgatacgggtcatgcggctgtaactggccaacggtggcggcggcgggctcaccatgcgccagacaatacgtaccagcatgatggcgaacagcgtgatgccaatgctcttgtgcaggtctggcgcgtctttgcgccaggcgctgtagtagtcgagaccgaccatccacaaccccagggcgaacaagccaaacaccaccagggccacgccccagtgcaaaaccatgctgacccaaccatagcgggccggtgaattgcgtagctgcatgtacttaatcccgtaagagctgtgcccaagactagcgatttacctatcgaattaaagcggaaaatttcgctttgaaatatcgagaaatacgatcaagagattatgcacagtacgttaacaatggattaaggactattcctaagaaacgtgacagaccgtcccgcgtttactacgaattcagccgttatgggttgtgacacagccgcccattgcataggcttgcgcgattgtttcacctgcgccggccgcaggaccgcttcgaggagatcaccgatgggcttgaacaaccagtggatgcaacgcgaccttgccgtgctgtggcatccctgcacccagatgaaagaccaccagcaactgccgctgatcccgatcaagcgcggtgaaggcgtctggctggaagacttcgaaggcaagcgctacctcgacgccgtcagctcctggtgggtgaacgtgtttggccacgccaacccgcgcatcaaccagcgtatcaaggaccaggtcgaccaactcgaacacgtgatcctcgccggtttcagccaccagccggtgattgaactgtccgagcgcctggtggcgatgacgcccgagggcctgacccgttgcttctatgccgataacggctcgtcgtgcatcgaagttgcactgaaaatgagcttccactattggctcaaccgcggcctgccgaacaagaagcgcttcgtcaccctcaccaacagctaccacggcgaaaccattgccgcgatgtcggtgggcgacgtcccgctgtttaccgagacctacaaggcgctgttgctcgacaccattaaagtgccaagcccggactgctacctgcgccccgagggcatgagctgggaagaccactcgcgcacgatggcccaagtcatggaacagaccctggccgagcaccacgataccgtcgctgctgtgattatcgaaccgctgatccagggcgccggcggcatgcgcatgtaccactcggtttacctcaagctattgcgcgaagcctgtgaccgttacggcgtgcacctgatccacgacgaaatcgccgtgggcttcggccgtaccgggacgatgttcgcctgcgagcaggccggcatccgcccggacttcctgtgcctgtccaaggcgctcaccggcggttacctgccgttggccgccgtggtcaccaccgaagatgtctacagcgccttctacgacgactaccccaccttgcgcgccttcctgcattcccacagctacaccggcaacccgctggcgtgtgcggcggcactggcgacgctggatatctttgaagaagacaacgtcatcgagaacaacaaggccctggcccagcgcatggccactgccactgcacacctggtggaccatccacatgtctcggaagtgcgccagaccggcatggtgctggccatcgagatggtccaggacaaagccaccaagaccgcctacccgtggcaggagcgccgtggcttgaaagtgttcgagcatgccctggaacgtggcgcgctgttgcgaccgctgggcagtgtggtgtatttcctgccgccctatgtgattaccccggagcagatcgacttcctcgccgaagtcgccagcgaaggcatcgatatcgccaccaacagcaaggtcagcgtggcggtgccaaaagatttccacccaggcttccgtgatccgggctgattgcccgcactccttttccagagaacagaaatgagactgtcccgctttttcaccgacaccccgctgagcatcggcgatcacgaactgcccgaagcccaggcgcactacatcagccgcgtgctgcgcatgggcgaaggcgatgccgtgcaattgttcgacggttccggccaggagttcctgggcacactgctggaggtcggcaagaagcgcgtcaccgtgcaactgacggaaaacttcgcaggccaggccgaatccccgctgcacatccatctcggccagggcctgtcccggggcgagcgtatggactgggcgatccagaaagccaccgaactgggcgtcaacgccatcacaccgattttcagcgagcgctgcgaagtgcgcctcaaggacgaacgcgccgacaaacgcctgctgcactggcgccaggtggcgatcagcgcctgtgaacaatgcgggcgttcgacggtgccggtgatccacccaccgctgttgctggcggactggttgaagcagaccgaggcggatttgaagctggtgctgcacccggtggccgagccgatggtcagccatgccaagcctgccagcctggcgtttctgatcggccccgagggcgggctgaccgaccacgaagtcgaaaccgcccagggtgccggctaccacgccgcccgcctcggcccgcgggtgttgcgtaccgagacggcgccggtggtagcgctggccgtcgcccaacagctgtggggcgacttctagggtttactccaccggatcgctgatcggtttggcgatgatcgccttcaactcagtggtcatcgggaattccaggttcaagcccttgggcggaatcggctgttcaaaccagcgctggtaaatcccgttgatctctccgctgcggtacaggtctgcgagtgtctcgttgaccaccgccaggaactgcgggtcgtccttgcgcaccatgcagctgtagatttcccgcgattgctcctcgcccaccaccacccagttgtgcgggtccttggccttggcgcgttcgccgtagagcaacgcgtcgtccatgtagaacgccgtcgcgcggccggtctcaagcatcttgaaggcttcgccgtggtccttggcgctgatcacgaacatattggccttgtgctcggcgttgtagcgcttgaggaaacgttcgttggtggtgccggccgtggtcaccacgttcttgcctgcaaggtcggcgaaaccctggatgccgctgtcttttgccgtgagcaactgccccttcacatagataaacccgtaggaaaaccccacctgtttctgccgctcggcggtcaccccggtggagccgcattccaggtcgacggtgccgttctgcaccagcgggatacgggtctgggacgtcaccaggttgtacttcacgttgagcttggccaccccggttttgtgctggatgcgctcgacgatcttgttcgccagctccactgaatagcccatgggcttgccactgttatcgcccacgtaggaaaacggcaccgacgcatcgcgatagcccaaggtgatggacttggcgttggcaatcttgcccagcgtgccgtccagcggcgtttgattggcatgggcctgcgcgcccagcaaaagccccagggtgcagccggtcaacaggatctttttcattgttattctccgttggttttcgggttgtgagtcttcacgcagcgcggggcgtaaggccccgcatatcaatggagggcgtttgctggccgatcaattcagccagtaactggccgctgccacaggccagggtgaagccgagtgcgccgtggcccaggttcagccacaggttgcggtagacgcctgcgccgatcagcggcacaccggtcggagtggccgggcgcatgccggcccattccactgcgtgggcgtaatcccctgcaagcggaaacgtctccacggcctggcgtttcatcagcgccaggcgcttgggttcgacgcgggcgtcgaagccgacgatgtccaccatggccgcgacccgcagttgttcgccgatacgcgcgtagaccatcttgcggtcatagtcggtgatgctcacgttcggcgcctggtgccgggcgccaatcggcacgctgaggctgtagcccttgagcgggtacagcggcagcgacacgcccaactcggcgctgcgatacccggccgacagcaccagatgttcgaccggcatcacttcatcaccgacctcgatggcctgcaccgcgccctcggcatggcgaatcccggtgaccttgcgccctaacaagaaggtgcaacgtcccgatgcctccagccgcgccgccaagcgctggcagaaggcatgacaatcagcgacctcttcattcggcgtatagatcccgccgacaaatccaccgcccgccaacgccggttccaggcgcgcgcaatcagcggccgagagcacttgctgttgcaggatatcggtgaccttgctgcgggcatgctcaaaggagccggcattgcgaaaggtcaccagcttgccgttgcgccgccagtcgaaaccgtccaggtggtcgtcctcgcgccactgctgcaaggtgtcctggctcaggcaggccaagcgcagcaggtgcgcggcattgcgcttattcaccgagccacggcaagcgccgaggaacgccgccatccagcgccactgttgggggtcaaggcgcgggcgcagcttcagcggcgagtcaccgcgcagcaaccagccaatggcttgcagcggtacacctttatccgccagtggtgccacgtagcgataggacaattgcccgccgttggcgaagctggtttcactgcccagagtgtcacgcgcatcgatcaccgttacctcatgacctgcgcgcaccaacgcgtaggcgctggccagtccaatcaccccaccgccaataatgcacaccattcccgccgcccgtcgttgaatcaagaagcctccagcctaggggcaggtgacaggccaccgacaatgaataaagatgggctacctataaacaaaggttatggactcgccatgcgcttgcgtcatatcgaaatcttccaggccatccgccagaccggttcggtcagcgccgccgcgcaattgctgcatgtctcgcaaccggcggtgaccaaggtgttgcagcacgccgaattgcagctgggcttcccgctgttcctgcgggtgcgcggcaaattgctgcccaccccggaagcactggcgctggaacgcgaagtggagaaagtcaccgatagcctgcaaggcgtaagacgcttggccaaaagcctgcgccgtgaaccgggccagagtgtgcgcatcggcgcgatcccggcgctggcgctgtcgctgctaccgccggcgattctggagtggaaacgcgattacccggacatagcctgcgagctgtccagcgaccatagtcgcgagctggtgcagaagctgttgatgcgtgagattgatctggcgctgacgctcaatttttccggccatccggggttgaccacgcaggtgctggccaatggcgtgttggtggcattggcgtccaaaggctattggccgccagccgaactgagcaagcccttgccgttggctgacctggcgggcgcaccgctgatcggcctctccagcgccgacccgctggcggcgaagctcgacagctacctggaaaacgtcgacccaccgcccagggtaacgatctcggtgcaaacctattccctggctcgcgccatggtggaatccggggctggtttgacggtgatcgatcccttcaccgcgctgggtgcgtcaacggccaccacctgcatccgccccctcacaccgccgctgccaatcaccctgtacgccctgacccgcgccgacgaaccgccgccgcatatgttggccaatctgctggagatctttggccaccgtgccagggagcttctggagcggctataacacgtaatgcatgatcgccacaaaatgcagcaggctgccgccgatcacaaacaaatgccagatcccatgggaatgccgcaggcgatcctccaaggcaaaaaagatgatgccgacggtgtacaacaccccgcccgaggccagccagataaacccggccgtgcccaatgctgccagcagcggcttgaccgccaccaacacgatccagcccatcaccgcatagatcacgatcgacaggatgcgcgcctcggagcgcggcttgatctcctgcaagatcccgatcaccgccaacccccacacgatcccgaacagcgtccagccccatggcccgcgcagggtcaccaggcaaaacggcgtgtagctgccggcgatcaacaggtagatcgaaaagtgatcgaccttctgcatgatctcctttctgcgaccctgcacgctgtggtacacggtggacgcgctgtacagcaccatcaaggtaaagccatagatcgccacactgacgatcttccaggggctgccgtccaggctcgccaccaccaacatccacacggcgccaatacacgccgcgacagcaccgagcaaatggctccaggcgttgaatcgttccccgtggtacatgtgccgctgacctcctgtaaccgttaggactggctggcaagcgtccagccttgcgcataagagtgcaagcggcttatgacgttccggcgacgccgaagggttttgcgggcacaatcgaccgcattcgaacaagagccacggccatgctgatcgacgaagaattcaccctcaagaaactggaaatcttcctggcgttcatgcgcaccggcaacctggcccgcgccgccgccgaactgcaaaccagcaatgtgagcgtacaccgcgccatccactccctggaaaacgcgctgcgctgcccgctgttcaagcacgaagggcgcaacctcacgccgctggaaagcgcctacgtcctcgaagaacgtgcgcagaaactggtggccgacgtggtcgacagcgtacgcctgacccgcgaagccgccgggttctccgccgaacgcttcaaattgggctcgctgtattcgctgacagtgaagaccgtgccgcagctgatcatgggcctgaagatccgccgcagcgagctcaatatcgacctgatcctgggttccaacttcgacctgctctacaagctcaagaacatggaagtggatgcgatcctcatctcgctggacgagcacgccaacgacccggactgcgagcagattgcgctgttttccgacgacatcttcctcgccaccccggccgactcgcccttcgaccgcgaacagcaaatcgacctcgccgacgtgcgcgacgcaaccttcatcaccctcacccaagggttcgccacgcaccaggatggcaatcgcgtgttcaagcaggcggggttcgagccgaaggtggcgatgcaggtcaatgacatcttcacgctgctgagcatggtcagctcgggcgtgggttatgcgctgctgccgggtaggattgcggcggtgtatgagaaccgcgtgaagctcataccgctgcaacccaggtatcggttgcagcagcatatcggggtggtgttcttgaaggccaaggaaagggacccaaacctgctggcgttgctggcggagtgtcggatgtatgccaaccgccaggtgccagcctgacacaccgctatcgggggcaagccccctcccacacttgaaatgcgttccaaatgtgggagggggcttgcccccgatgaggccctgatagaccccttacccaaccaggccgcgcacaatgaaatacagcagcgaaggcccaagcaggcagcccagcccggtgtggaacgtcgccgtcagcgcgccatacggcaccaaccgccgatccgtcgccgccagccccgccgtcacaccgctgacggtgccggccaacccaccaaacaccatcgccgaacgcgggttgtccaagcccatccagcgcgccgcgaccggcgtaccgaccatgaccaggatcgccttgatcaagccggtggcaatcgacagcgccatcacatccgaggtcgcgccaatcgccgcgccggtcaccgggccgacgatgtaggtcacagcccctgcgccaatggtggtcatgctgatcgcatcgcgataaccaaacacccaggccatgctcgcaccaacgataaacggcaggatcgtgcccagcagcagcgcgatcacgccgatcatcccagccttgcgcgcctcggtggcttgcacttcgaacgccgtggcgacgatggcaaagtcgcgcagcattgccccacccatcaacccgatgccagagaacagcgccaggtccgccaggcctttctggccgccggtgatcgtaccgccgacccaggccaataccaggccgatgacgatggcaatcgccgagccatgaatgcgtccgaaggtcaggcgcttggacagcaccacggaaatccacatcaccacacccacgaaggcaaacgcggtgatcaggccgttgtgttccaggcctttttcgatgagatcccacatatcagcgacctcccactggagcaatcagcggctcttcatcgggcaacggttcgcccttgtgcgtgcggctgatcagggcaatcgtgcaaccacataccactaccgaaccgatcgcggcgagcaccgccaccgggccgccgtgcagggcggtgaccacgttttgttgcgcagccatcgccaccaccacggggatgtacatcgcgccccagaatcccacgcccatttcgcagtccttggtcatgccgccacgcttttgcatccacaggcgggcgcagatcaacaggatcatcgcgatccccaccccgcccacattggatttgacacccagcaacacgccgagcatgtcgcccatgatcacgcccgcaagcgtacagatcgccagtaatgccacaccgtagataatcattgttgttgtcctcaaagtgctcgatcgaaattgttgttgttgtgcttcgaaagccttgggcagtgctttatcggtggcggcggtcctcctcttgcagcaaggcctgcagggtgtccaggcgtgcgccttcacaggcgatcaccgtgccttgctcaaacacccgccgtgacaggccggtgagcactgcgcccggtggcagttcgatttgcaggcgcacgccgcgctcgtaggcgctttgcacggtgccgcgccagtcgacgacgcggcacatgttgaaggccaggtcgtcgcgcaattgctcggggttgtgaatcggccgtgcgcgggtgctgctcaggtaggtgatgcgcggcgccttgagcgtaccgaaggcttgggccagggcctgggccggttggtccaacaatgcgcaatgggatggcacgctgacggcgaggcgtttggcgatgccgttgcctttgatgcggtcggcgacgcgtttcatggcctggtcgctgccggcaatcacagtctggttatcggcattgatattggccagatacaccggggtttcagggctgtggacttcggccaacaggttttcgacggtggataactcggggccgatgatcgcggtcatgccgtagccctgtggataagcgttttgcatcagctcaccgcgcaggctgaccagcttgattgcctcgttgaagtccatcgcgccggcaatcaccgccgccgcgtaggcaccaatggacaggcctgcgacgtagtccggcgtgtgttgcagcaggcgggcgtgggccacgccggcgatcagcaggcaaagttgtacagcgcgggtattggccagggcctcagcagaatccaaggtgcgcacgtcttcacccaaggcatcgctggcttgttccaacacatcggccggcaacgcctggagcatgcccgagcgttgggcgccctgccctgggaacaccagaaggctgctcatgccacggcctgccagggatcaaggaccaaatgcgcaccgttggcggttttcaacagcacccgccgtgatggaccggcccattcgcgcaagacgacggcaccgaaaggcgtttgcagttgcatatccacagcgcacgcggcgttgtccaaggtggccaacaagtcgcgtgcatcgctgcgatccagcggatcgggtgtgcgcagaatcaggtccaggtcgctctgggcatgcagtgcttcaatgcccgttgccaactcaaaaccagcgctacccgtgacgccccaactcaatggcgccagcaccggccgcagttgatcaagggcttgcaatgccggtagatcccttgtcgaaaccacatcgcgcaacgcctccggcgcgacccgccgctgcacggctgccatcggcatcaacgcggcaaaccgctgctcgcgcaaacgcccacgcacacccaccgcgacaaagcccggcgtgacgatggcgcggcgcacgaccaccgtgccaaccgcatccttcgcccacgccggtgcgtcagcgggcaggtgcgccggggtcatgccccagagcaggtcgtgggcgttcaccattgctcccgcagcagttggcgcacatggctggaggcggcgcggttggacgcaccgaggcggctgctcaaatccggcgtgccgacatccttgatcgcactcaccaggcactcgttgacccgcgccacatcttgcgccgtgggctgttcgatctggctgaccgtcaaggtctcccacaacaggccgaggctggcatagctgtcgatgtcataggccatcggcggcacgctggcggccagggcttccagctcttcgacgctgcgcagggtcacccgcgccgccgaggccttgcccatggcgtgcaccatcacaccggggtcgcgcagggcgatcaggcgattggcctggtagccatgggcgaggaacgcgccggacatggctttgcccaccagcagcgcgatcaccgggtgcccggccaatcgggcacgggcatagctgtcggcggcggcagccagcgcctggtggatgccgagggcttcttcgcgccggccataggcctggctgggcacgtcgacaatggcaatgatcgggcgtttgtcgcctcgggcgatggcttcatcgacagccttcgccaaaccccaaccttcgagcaaaccgacttcgccattgcgtgcgcgggggaaacggttttgcgcgtcggtgaccacggcgataaagcgtacggcttgctcgcccagcaggccgtcggccactttcagggagttcggcaaaccctcaacgggcgttgcaccggcgctcaatgcgttgaaccactgcaaacctctcatgagcgttctccttgaaacagcgcgcgtaccgtcgccgggtcgagctgcggcgtagcatccagttcggccaggcgcgccaggtagtattcggattggcggctgcgttgctgggtgggcaggccctgttgcagcaatgcactgacggtctgttgaatctcggccacatcgtccgctacataacggtcggccaagccgctgttgaagcgctgctcgccgccggtgaggctccagatgaagggccggtcgcgggagtcatactcttcaagccccgcttcctgttcgatgacttgcggaccattcaagccaaggcgggcttcgcgggtgacgacaaggtaactgcacaaccccgcggcgatagacatgccgccaaagcaaccgacactgcccgccaccacgccgatcaccggctggtactggcgcaggtcgacaattgccgcatggatatccgcgatggccgccaggcccaggttggcttcctgcaagcgcacgccgccggtttccagcagcaacacagcgcgggttggaatacccttgcgattgtcttcggccgccagctccagagcgccggcgattttcgcgccgcccacctcgccaaggctgccgccctggaagttgccatcgatggcggcaatcaccaccggttttccaccaatgctgcccttggcgatcaccacaccgtcatcggcctggggcactacgccctggcggctcagccacggcgacatgacgcgctggaacgggtcgatcaattcgcggtaggagccggcgtccagcaaggccttggcacgctgccgagcgcccagttcaacgaagctgtgtttggcgagtaaatcagtcatgaccgacctcctcgaaaccctgctccaggcgcaagcgcaccacgccgggggtggcgccaaaatcgtggatatcaatcttcaacgccggcggggtctgctcttggaacatccgctcgaacagatgctgccagcgttgctcggcaccgttcaccgaggtctgcacctggatggtcagggtgcccggagtgcccggctccagcagcacttccaggtcgcccgagccgacgcagcccaccagtgcacggcctttcggtggctgcccggcggggaattcaaaggataaggtttccatcacaacgctccgtcgaggcggtcgataaacaggcaggcggccaacaggtcggcggcgccgccgggggaggcattcagggccagcagttgctggtccagctcatgcagttggcgacgaccggccagggttgcgctgccgccagcgtcgagcaccgcttgggcaccgtgctgcatggcttgaaggccctcggtgccggcgcggtaaagcacgcaagtgtcagccagctcggtcatgatcgcgagcaaggcatccaggcgcgcattctgttcgccggcatgctgcaggcggcttttgcgcagttgcggcaggcctcgttgtaccaccgaggggaagccgagctgcgcttcttcacgagccccgcgtgcgccgtagcgctgggcaacctgggcgccatggctcaggggttgcggagcgaagcggtcgttgagcagggccagttgggcggcggtcagcgtcacggcgcgtggttccagcgcggcggcggcggtgagcaaaccgagggcccagatcgcgccacgatgggtgttcaccccgttggtggtgataagcatcgcttgctcaccttcacggccaatgcgcccgagggcttcgcgcaggggcaagccgatttcaccgatctcaatcgccgcctcggccatttccttgaacatcggccatagcgacagcgccgaggcgtgcatcaggcccaggtgtaaatcgctgtgggcgccgttgccgcgccggtccaccagggcgggcttgggcgacaggtcggcttcatcgatcagcgcatcgacggccatgtcggccagttgatccgcaaggctgagttcatgcagtttgagggcgcgcatttaccagctcctgaatttggcgggcgggttgtacagaccaccggaccagtccaccaggtcagccacgctcttggcggccaacagttcacgagtggcgtcggtgcggcgaatccccaggtcttcaggtaaggcgatcaagccttcgcggcgcatgcgtgcagtgtccttggggttgtggcgcatgccgatggcggtgacgcctgcgacggcggcgatcatcgcctggcgctcttctagggagcgcgccttgtacaggtaggcgataccttcttcggtgagcaggtgggtgacgtcatcgccgtagatcatgatcggcgccaggggcatgccgcttttgcgtgcgacttccacggcgtcgagggtgtcgacgaaagtgggtttgccgccttcctggaaggtctcgaccatttgcaccacgagttttttaccgcgttccaacaaggcttcaggcgcatcgtcgtgacgcatgtccagccacgccggcgtaccatgacggcgaccgcgcgggtcatggcccatgttcggcgcgccaccaaacccggcaaggcggccacgggtcacggtggaggaatggccgtcgccgtcgacctgcagggtggcgccgataaacaagtccaccgcgtattgcccggcgagctggcagaacatgcggttggaacgcatcgagccgtcgcggccggtaaagaacacatccggccgtgcggcgatgtagttctccatgcccagttcggtgccgaagcaatgcacgctttcgacccagccgctttcaatcgcggggatcaacgtggggtgcgggttgagcgtccagttgcggcagatcttgcccttgaggccgagggattcgccgtaggtcggcaggatcaactcgatggcggcggtgttgaatccaatgccgtggttcagcgactgcacattgtgtttttcgtagatgccacggatcgccatcatcgccatcaacacatgcaccggcttgatgtggcgcgggtcgcgggtgaacagcggctcgatgtagaacggcttgtcggccactaccacgaagtccacccaactggcggggatgtcgacgcggggcaagtcggtaacgtcatccaccaactggttgacctgcacgatcacaatgccgtcgctgaacgcggcgggctcgatcagcgccggggtgtcttcggtgctggcaccggtgtagatgttgccggcgcggtcggccatgaaaccggcggagagcactacgttggggatcaggtccaccaccagccgcgcatagagttcgatgtaggtgtggatcgcgccgatttccagcaggccgtcttcgagcaactggctgatgcgcagggattgggtgccggcaaaggagaaatcgagcttgcgggcgatgcctttttcaaacaggtccaggtgctcggagcggccgacactgggcatgatcatgtgcaaatcgtggagcttggccgggtcggccttggccagggagcgcgagaggaaatcggcctgtttctggttgttgccttccagcaccacgcggtcgccggggaggatcaacgcctcaagcgcctcgacgatcctgtcgctgggcagcaccgcaccgtctgcgtactgtttgaccagcccgagccgccgctgcttctcgtcgcgccgccgcgtccagcgtgagtcgggggttattgttgttgtcatggtcgctccacgggtttgctgtcgtggggcttaccttaggagtgattgagggggccatcaatcaagctgggcgctggactgttacgcctgggttaatgatgcatcaataaacacgggcgttcaggtgcggtgccattcggtgtggtggaaccatacggtcctgaacaacgccaaggcggcaaaaacgtgcagccccaacacagccgcccaactccactcccacaggcctgatagcgcctgggcgtaaaccggcaacagcagcaagagcagcgccaccagcgcgcagccgcccagttgctcccagtttctcaagcgactgggacgggaggctatggcgtaacccagcagtgcacccaggcacaccaccagcaggctcagcaagtcatgctcgtcgacgggcggccagcccagcaggttgagtggcaagcacaccgcgaacacggtgaacgcgcaaatcgcgacgtacacgaaggcgtattcaagcgcatccagcagacgatcacggataaaccctcgggcctgtttgtcttcttccggggtaggtcctttggatatcgccaccgccagcagacccgagccaagaccgcccagggtcatgaccacaaagttgctcacgacgcccctgattgccttatcggcaccgatcagcttgaggctttccaggtacaccaggataaacaccgcgcctgcggtggtaatcatgaacccccacagcttcccacgattggactgcacgttcatggtcaccgctgccgtgagcaccagcacgccaaaccacatcagaagcgtgccggtaaaacggttgaggtcgtacagccaggcaaacccatccaaaagccacattgcgtcgatacttctgtcgaaaaactcccttggctatcggcagtggggtggggatctttacgaggggaaaggaacaagtgatccgcaacccgtcacaattcaccaggacgcctctcctacattttgatcgagtcatgcccactgatagccagccaacaggccctccacgtttccctgcaacgtggtcgtgctgtcaatcaactgggctaagagcggctcgtcctcatccatatacccttcgtactccgccaggttccgacgctcatgacacagcgccaacaacctcacctgcaccttgccggcacctgtggtgtgaaccaggcattgaaacaccagatagcgtttgtccgagcgatacccctgcaagcgcaaggccgtgagggcgatagcacgagccgcgttgtaagccaggtcgaaacgactggcgaatgataactgcggattgccggcatccctcagccgatccctggctgaacgcatcagcccatcacactctttgcgatccggcggctcagccttcaaaccgccgctacgttgcagattctccaggtttgccttgctgtccatccgtggattccagggggttgcccccaatcagattgatcttgtcctgctgcacgacccgctgcacaaaactgttcccgacattccatttgccgatccagtcttcaggggtgtaaagcgtcgggttgatggtgcgccccagttgctcttccagtggcatgagctgctccatgacttcactgtagttgaggctttcgccgatcaacatgagatctatgtcactggatgagtgcgcctcgcccttggcgatggaaccgtagacaaaggcccaggttatctgctcggcgaaaggtgccagtgcatcgcgcaagggctcgtccagactcagggtcttgcgcacgatagctaacaattccgagtagatagggcattggggattggcttggtaatgggtctggttgccctggcgcgtcatgttcaagatgcccgccaactgcaaccgttcaagctcacgggtgagactgcctttgcccacttgggcccagcgtgcaatttcattggtgaagaagctttggtcgggcttgccgaaaagcaggcccagcactttttgctgggtgacagtgaagagcgcagtgctgagcggcaaggtgtgcatggcagcggccaaagagtcccaaaaagggaacgataggtccctttttgggaacgatcaagttttaagcgactggagaaggggaaatctgttccaaggcacggtccaccagcaactgccccagctccgccatctgctggatgccgagcatgattgcgcgctgggaggtgtccaggtcgaaggcgaggttgcaagtgagtgcgttgagggaggacagggtttcgctggcgttgaccagcagggtttcggtgtcttggtgagggtttacggtgaagaggggcggattgggggtaggtttgatcatgatctacaactccgatatgtgatggagactgccctcttccgcttgcacgcgaattaaggtggcagctgtgcgcaggtgtgcaagaccgggcatatcggaccccggcagaccccgagggatctcccacgcacagccgccataacgagtacagcaggcataaaaaacgcccgttgaatggctatgggcgtttgtgcgccgacatgtaaccggacttgcacgtccgtgtcaccgttttttgcgatgacggggcgaagactaggcgcgctgacggcatgcgacaagttcatgcacagcccaaaatcttgcaggaaaaatccgagagcctgccgacctataacctcatgtctagtctcacagcccctaaaccttcgagcgggtaactacggtactcataaacctcacctcgaacagtgaggcggataaggcccccctgccgggtaacttgaacatccggctctttggttttcagaaaagggtgtgccgacaccaatgtcgtgagtatttcccgatcattccccagatccttgtggacgtagtacaggtaggaaaagcccaccgtagcgccaccctgattgtttcgcgcaccgtaaatggagctcccgttattcagagaatacttgagcacaacctcatccaattccggtggacctgggctcatcaaccaaccaacacccaagtacccgagacacaccaccagcagcccgttgaacaagccctggaccggccaattaatacccttgagctgtggcatattcgataccctccttgatccaatgctggtcgctgtgatcatcgccatacggcgcatcgccccaccagtctccgaactccgcccgagaagtccctgctgccttttgcgccgcaccagccgctctcaacagcacactctccggaatacccagcacagtgccggtgacgccgtagttgaagttaccgaacgcctcatactcgcgacttttctgtttgtaatcccaagggccacgccctctgacctgcgagtaaaaccacgaataggcgaaggccgaaccaggcttcaaatgcatcctgcggttgttggccaaggcgatattgtcttgcagcgaaacgcccgaaggtatgggagggacggccatttgcgaatccttgctgatggggttgagcgataaaaactagcactcaaacatcagtaaaaatacgaaggtgagacttacagaaatttcagacacgctatcagtccgagccctacctacgattgtcgtcccgacaagcaacaaagaatgttctgacagcgctttcaggttgttgctcggaacctgtgtctctagcctttccgctccgaatcgttccgcggacagacatcatgaagccgaccgttaaaaccgatgcaaggccattgcagagcgtgatgtatcacatcacaatcgtgccatgatcgtcagctggaaacacaaaggtctcagggtcttctatgagacaggctcgaccagtggaatcaacgcaaatcatgcaaagcgcttacgccgcgttctgttcattctggacaaagccgaacgtccagatgcactgaacttgcctggttggcgtttccatcggttgaatggcgacctgatcgactattggtctgtcagcattagtggtaactggcgcatcatttttcggatgttcgacgaccaagtcgaactggttgattatcttgattaccactgagtagaggtatcgatatgggcatgcacaacccccctcacccaggtgaaatcctgcttgaagatgtaatccctgccctgaacatcaccatcaccgaaatggcccggcgcctgggattcgcccgtgagacattttcgaggattttgcatgggcgtgcgcctgtcagtcctgacttggcggtgcggcttgagcgggcaggtgtgagcactgggcagttatggctgtcgatgcagagtgcctacgacttgtggcaggccgagcatcgggagcagccggtgattgagcggtttgcgcggattgattgaggtctacggattgtgggaggggcggtacgacgattcgacttgctcccgatagcagtgggtcagccaccagatgcagtgactgacagattgcaatcgggggcaagtcgaatcgtcgcaccgcccctcccacattttgatattcactgggattgagaatgagggatcaggccaggccggactctaccagcagtgcctccagcccaagcaaatccggcaccttcgccacatgctcgcccacctgcaccgccgccagttccagcgggcacagcggcacgtccacataactcaactcactgtcgagcttgtacgacctgggaatgccctggatcaccagcgcaataaacttcaacgtcggccgcccgcccaatgcattcaacaccacgatgcgcgagcgttcgccggtcacgctcgcttcgccgcacaccgcttcaaagctgatcagcgggatttgccggtcgcgccaggtcacttgccgcaggtaccacggcggagaatcgctggccggttcgccgcgctggaagtcgatcaactcggcgatggcgacattgggcagcaccaggtggcggtcggccaggggcagcagcaggccggtgagttggctggtgcggtggtcaagcatgggacttgctccagtaggcgatgctttcgagcagcaccgattcctggtacggcttgcccaggtagtcgttgacgccaatggccatggcgcggtcgcggtgtttctggccggtgcgcgaggtgatcatgatgatcggcagacgcatcagccgggggtcgttgcgcacctgggtcgccacttcgaagccgtccatgcgcggcatttcgatgtcgagcagcatcaggtccggggtgtgttcttcaagcaccgccagcgcgtcgatgccgtctttggcggtgagcacgttcatgccgttgcgctccagcaggcggctggtgactttgcgcacggtgaccgagtcgtccaccaccagcaccagcaacgggcgttttttcagcgggtcgttgaggatcagtggcgcatccaccgactgagccggcaatgccggctgccgcgcacggatatgcgccagcaagtcgatgatcaacaccacacgaccatcgcccaggatcgtcgcgccggacagcccctgcacaccggcaaactgcggccccaggcccttgaccacaatctcccgcgtaccggccatggcgtccacatggatggccacatgccgctcattgcactgcaccagcagtaccggcaccggttgatactgccccagcagtttcgggcggctgacgctgtgcagcaggtcgcccaggtagaacagctcgtaacgctggccggcgtattcataacacggcggatcttgctggtaatgcccggccagctcatggggcagtacccgcaccaggccttcgatggtattgagcgggatcgcgtattggtcgtccgcgcactgcaccatcagcgcccggttgaccgacacggtgaacggcaagcgaatgcggaaatgcacaccctcgcccggggtcgaatcaatgaccatcgagccaccgagctggcgcacttcttcatgcaccacgtccatgcccacgccgcgcccggaaatctgcgtgatcttttcagcagtggagaagcccggctgcaggatgaactgcaacacgtcacggtcgctgatctcctgattcggggccagcaggccacgcttgatcgccttacgccgcacggcttccaacggcacgccggcgccgtcgtcgcgcatgtcgaagacgatatcgccgccttcgtgggtcaggtccagggtgatgcggcctttctccggtttgccagccagcagccgtgcatcgcgggactccaggccgtggtcaacggcattgcgcagcatgtgttccaacggcgccgccatgcgctccagcacgttgcggtccatctcgccttcggcattgccgacgatgaattccacgtccttgcccagctcgcccgccacctggcgcacgatacgcttgaggcgtggcagcatgcgttcgaacggcaccatgcgcgtacgcatcaggccttcctgcaactcggtattgatgcgcgcctgttgctgcagcaggccgtgggcgtcctcgttgcggcgctccagggtgtccttgaggtcgagcaggtcggaagcggattcggacaatgcgcgggacagttgctgcaactgcgaatggcggtccatctccagcgggtcgaactcttcgtagcccaggcgctcggcctcggcctgctggcggctgaggatacggccctgggtttcggtgtcgagacgccgcagttggtcacgcatgcgttcgagggtggtttccacttccgtaagagcgatgcgtgcgtcgttgacctgctgctcgatgcggccacggaagatcgaggtttctccggccaggttgaccagatcatccagcagctcggcggagatcttcaccatgtcggcagtcgggtccacgacggcctccgccttgcccgcaggcaacgccaccggcgtcaccggctcctggctggggtgtaccaggcttttgatgcgctcgatgagcttgtccaccgagccgaccggcaagccgtccgccacggcgtcgatcatctgtgccagacggtcgtggcaaccttgcagcaacgcaaacagctcaggcgacggcgcgagcaggccggcagacaggccttcgtagagaaattccagttcgtgggccaggtcgccaatgggcgcaatctcgaccatgcgcgcgccgcccttgagcgtatgcaggtcacgcagcagggtctccacctcctggcgattgccgggctcggcctgccagcgcgacagcgccgcactggaactgtcgagaatgtcggccgcctcttcgaggaagatatccagcagttcagggtcggcgcccgacgccgctggcgcagcggccggtgcggcaggcgcgttgccttggcgcagcgcccgcaccttggcgatcagctctgcgttgtcgctcaagggttggtgatgctgcagctcttcaagctgcaaggcgaggcgctcatggctggccatcaacacctgggacaattcggcggagtaactgtagcgacggtccaccaacccttcgtacaggcattccaactcatgggccaggtcgccaatcgggccgatttcggccatgcgcgccccccctttgagggtgtgcagatcgcgctgcaatgacgacaacggcgcagcactgtcgggctctagcagccagcgcttgagcgactggccagcgctgtcgaggatgtccacggcttcttcgagaaagatctcgacgatctcgtcgtccatcgtgatttcgtgatccaactgctgggtagcggcgcccagttcggcaatgctcagcactcggctgccgtcacttttgatcaagccggtggcggacgggtcgagggcttcatccagcagttcgcgcaaggcctcgacccgcgccggcgccgggctgatttcctggccggcggccagttggtcgagcatgctgatcagcgcttcatgggcctgttcagcctcgtggaaaaaccgctcgctcaccgccaggctgctttcttctaccgccccgtacaaatccagcaaggcttcgcagagttcgtcgatggcgtgcagatccgcgacgtgcgcgccttcgcccagggtggtcagttcatccagcagtgccgtcagctcctggcgctcgccggggtgctgctgccagcggcgcagcaggctctcggcgtcgagcaggatgtccatgccttgggccaggaagttggcgatcagctgcggatcgcgcttgatgcgcacgtcgagcagcgcttcaagctgctgatccagcaggctttgcgtgcgcttgatcaggtcctctgcaccgttgatcggcgccaagggatcactgtccaggtcgcgcagcccacgctggaacaggccttcggcttccagcagcaattccacttcatccaggtccagcggcaggcggtgggccttgtattcgcgggtcaggtggtccagcgggcgtgccagttcggcgatgggcagcacgccggccatgtaggcgctgcccttgagggtgtgcagggcacgttgcagttcatcgctgacttgcagcggcacatgctcggcggcctgttgcaggaagtggttgaggctgtccaggtggctctgggcttcgttgcggaagatctccagcaacatcggatcatggggttcggcggccggcacagatgtaccactggccaaggtatgcgcgcgggcggccagggcgtcgacttcatcgcgttggcgctggtcgtcgatggcaaagtcagcaatcaattccggcagcagggccaccgcttcatccagcacctgctgcacctcggggccgagcaccacgctgcgctccagcacacggttgagcaggttttccatggcccaggccagctcggccaagaccagggcgcgcaccatacggccgctgcccttgagggtgtggaaagcgcggcgcatttcgccctgggcggttttgtccgcgctgttgggcaggtaacggtgcagcacttcgaggacttcatcggtttcttcgaggaagacttcgcgcagttcgtcgtcgatgggctcctcgtcggcgggcggcggcagcaggctgccggggcgttgcagggccggcgggttgaggcgcgacgtcggactggccagggcgtcgaattgggattggctcggcgcgagttcggccggcagtgcgccatccggtgcaaccaacgcctggcgccagggtttctcggcaggcaggtaacccagcgccgccaagccttgagtggccagctccagcacgcgctcacctgcagcatcggggtcctggagcatgcgttcgaggtagtactccaggctgctgatcacgtcggcgaaatgcgccaattgcatctcggacggtggcgcgtcgctgcccatcaactgttcgtcgacgtaatccgtgcacccgtgcatcaggctcgctgcgcgaggcaacgggatcatcgccagggcaccgcgcacctggctcagcagctcgggcagggactccaggcgctgacggtcccaatcggcttcgatgcagtcgatcaccagttccttggcttgcttgaggcactggcaggactcgcgaatcaccaattggtgaatctgggtcaggtcggtggtgggcaggcggctttcttcgcggctctccggctcgacggtgccaaccatgccggccagcgtggcttcgacgtagagcaaggcgccggcgacatccatcagcaccgcgtcgttgggctcgcgttggccctgagccaggctcagcaccacggcgagttggtcgatgatgactttgcgcggctggccgaagcccagcaccgccagggtgtcggcgatctgccgcagcggtgcgagcagtgcatccaggtcgctggtgtgttgacggtcgctgcgcacgaacaagtcgaggcgctccttgactcgtaccagttcttcgcacaaggcaccgagtaccgaccccatcgcattgcggtccggcccggccaggcgtgcgcgctcggcgtcgaccaccgcgctgtcgggcagggcttcatccaggccgtagcgttccttcaagctttgcatgcgcggcgtcggccgagtgaccttggcgacgtaaaacaacaggctcttgagcagttcatccggcgccggctggttgatcccgccgatgccttgggccagcaggcgcttgagctgtttatcactggccttgagcaggctgcgcagcgccgggctgttggcgatcacaccggtgagcataccttcgaccagcgccgaggtgacttgccacagcggcaacaacggcgcgccctggcacaaggcttcgaggcgcgcgaacacccgcgccatgtcttccaggttgctggggccgtggtcttcgcgcagcaacccggccaaggcctgttgcagcagttggtgccactggcgcagttgctctttcaggtcgggtacggcgcgttgggccagggcttcgtcgggcaacggggcgatcgtcaacagttgcggactgaacaggctggtctccgacagcaggctttcaccgcgcgcgctgcgtaggtcgttgagcaatggcaacaccaccagcggcaggtcacgccgggcgctgtgcacacggtccagatacaacggcaattggttgagggcctgttgcagcaggcggatgctttcgtcgcgctggctcacgcggtcggcttgcagcgccagggccagtgcttcgatttcctcggccagcagggccgcgccatagaactcgaccatttgcagcgcgccatgcgcttgatggacacacgccaggcactcgccgatggcatcgccgtcggaggtttcgacgtacgcatcgagcgccgaacgggcctgtttcagggtttcggcaatgtcgcccttgacccattcgagggccacgtagtcgtgccgatcaaccataactgctccgcttagaattcatgggttgctggtggtgcgaggtctcaagacagatagagatcaaatgtgggagggggcttgcccccgatggcggtgcatcagtcaaagattgggtgactgacccactgctatcgggggcaagccccctcccacattgacactgcatttcaatcatcaacctgctttgcgggcgggagggtgaaccccgacaccgaccgtcgcaactggctggccatcttcgccaaattgccgatgctttcggcggtcgccgtggagcccgacgaggtctgggtggtgatctgctggatcacgttcatggtcagggagatctgccccgccgaactcgtctgctgctgcgccgcgttggagatgctctggatcagcgccgccagggttttcgacacgccctcgatctcttccagcgccaccccggcatcctgggccagccgtgcgccgcgcaccacttcggtggtggtctgctccatggaaatcaccgcttcgttggtgtcggcctggatcgcccgcaccagggtttcaatctgccgggtcgccgccgacgagcgctcggccaggcgctgcacttcatcggccaccaccgcaaagccgcgcccggcatccccggccatgctcgcctggatcgccgcgttgagggcgaggatgttggtctggtcggcaatgtcgtcgatcaggctgacgatgtcgccaatctcctgggacgactcgcccaggcgtttgatgcgcttagcggtgtcctggatctgttcgcgaatgttgtccatgccgtggatggtgttgtgcaccacctcgttgcccttgttggcaatttccaccgagcgctccgccaccgccgaggattcggcggcgttggccgatacctggtcgatggactgggccatctggttgatcgccgttgaggcctcggcgatctgctgggcctggtgctccgaggcctgggccaggtgcatggcagtggcctgggtgtcctgcactgcaccagcgacttgcccggcggtgaggttgatggtggcgaccaggtcgcgcaactggtcgacggaatagttgatggagtcggcgatggtgccggtgaagtcttcggtcaccgaggcggtcacggtgaggtcgccgtcggccaggtcttcgatttcatccagcaggcgcatgatcgcgttctgattgcgctcgttcttctcggcggtttcatgcagttggcggttggtctcgcgcaccatcaccaggccgatcaggatgatcgaggtcagcgccagcaggcccagcacatagccgccgatggtgtcgaagctgcgcccgccggccaggttttcgaaaccggtggccaggtgcgaagcttcatcgagcagggtttgcgacaggttgaagatattgctcgccgaggcacggacctggaacagttgcggcgaggtttcgaggatttcatccacggagcctgagacaaactcgaacagctcggcgatttccgccagccgcgcgcgggcatcgcggtcttcgacctgggtaatgcgcaggccggggttgccctggagcatgccgttgagcacctggccgaagcggttggcatcgcggccgaaggcgtcggcggcctgcacggcggtttcgtcgccggccagtacggtgttcaccgcccccaggatacgctcggccagcaacgactggcgctgggccagggcgacctggctggctggggcgccgcgctgcagcagaatgtcgacgaccttttccgactccacctgcaactgcggaacggtttccgccagcgtcgccgcgacctggtgcaaggacagcacggtctgttcgctggcgaggatcgcgtcggtgtttttcagcagcgcttcccagtcggtctgcaccgcacgcatttcagcacgtaccgcactgggcgcggccggcaggccggtttccgggtcaccttttttcaggtagccccagcgctgggcgaagtcgttgcgcgcatcccccagcagcttgaacgcggcggccttgccggcagcggcttcggtggcgttcttggcgatgcgctgggacagcacgcgcagctcaccggcgtggccgatgtactgcttgtcataggtggactgggtgttgaggtacgcgaagttggcgaacagcaacatgatgaacacgatcagtgcaatgaacagcacgatgatctgggagcggctgcgtgacgcggcctggggttttggcggggtaacggtggtcatgcggcaacatccatgaagccaggggcctgggccagggcgaaggggctgaagacctgccactgcgggttgccctcgaaacgcccctggatatacggtgcaccgggagcggcactcgccagcagtgcgtcttgtgcgaaatgctgcatccccatcacctcgtccaccagcagcccgacaaacaaatcgttgaattccaccaccaatacgcgccgctgtttgcgcgccttggacaactcaaggccgaggaacccgcccaggtccatcaccggcaacaagcgcccacgcaggttagccacacccttgacccaggccttgaccccgggcatcagcgtgcagcgcggttcatgcaggacttcggcaacttcgcccatgggcgccacataccagtgctgccccaggcgaaagccgatcccgctccagcgttgcaggcgggtttcctgggacggcaggtcggcggccaacaggcgacagcggcggtcgatgtccagcagcagctcaaaggcggtttgcgactcggtcatgatggcgaaccgtcagccggccagcaccttgttcagggtggcgatcagggtttcttcatccaccggtttggtcaggtagtccttggcgccctggcgagcgccccagatcttgtcggtttcctggtccttggtggtgatgatgatgatcgggatgccgttggtttccggctccttggacagctggcgggtggcctggaagccattgaggcccggcatcacgatgtccatcagcacggcgtcgggcttttcctggcgggccagggccacaccatccgcaccgttttcggccttgaggacctggtggccatgcttttccagcatgccggtcagtttgtacatttcggtcggcgaatcgtcgacgatcagaacacgtgccatggttttccccactacataggtggacgccggcccttgtgaggcggcgtcagtgtgcttgttctactacggcgaaccccggcacgtaggccttgatcgcgcccagcagttcttccttgctgaaaggcttggtcaaaaactgatcgacacccacgatgcgccccttggccttgtcgaacaagccgtccttggacgacagcatgatcaccgggatcgacttgaacgccgggttgttcttcaccagcgcgcaggtctgatagccatccaggcgcggcatcatgatgtcgacaaaaataatgtgcgggtgatgatccacgatccgggccagggcgtcgaaaccgtcgatggccgtgatgacatcgcaccccgtgttcttcaacaaggtctcggcggtgcggcggatcgtcttcgaatcgtcgatcaccatcactctcaaggcgttggaatgctgttccatatctgctctgccatcgccacagcgaatcggttttcggtgtgtactgcctgatgttgcacaggatgaacgccacaagcctcggaattcaagggctgctgcgccgtggcagtctttttagcacagtctccgggcgcaatctatcgagcaaccggccaggtggtttttccttgacccacaacagccgcagcgccactctgacgccacttttatgcgccctaatttgctagaggaaatcccccatgagcgttcgcgtcggcattgtcatggaccctatcgccagcatttcctataaaaaggacagctcgctggccatgctcctggccgcccaggcccgcggctggacgttgttctatatggaacagcgcgatctttaccagggcgacggcgaggctcgcgcacgcatgcgtccgctgcaggtgtttgccaacccgcagaagtggttcgagctgcaagacgaagtcgacagcccgctgagcgatctggacgtgatcctgatgcgcaaggacccgccgttcgacatggagttcgtctactccacctacctgctggagcaggccgagcgcgccggcgtgctgatcgtcaacaagccgcagagcctgcgcgactgcaacgaaaagctgtttgccaccctgttcccacagtgcacgccgccgaccgtggtcagccgccgcgccgacgtgctgcgtgaattcgccgccaaacatggcgatgtgatcctcaagccgctggacggcatgggcggcacctcgatcttccgtcaccgcgcaggcgacccgaacctgtcggtgatcctggaaaccctgaccgccctgggcacccaacagatcatgggccaggcgtacctgcctgcgatcaaggacggcgacaagcgcatcctgatgattgacggcgagccggtggattactgcctggcgcgcatcccggccgccggcgagacccgtggcaacctggcagccggtggtcggggtgaagcccgccctctgtcggacaaggaccgttggattgccgcccaggttggcccgaccctgcgcgaaaaaggcctgctgttcgtgggactggatgtgatcggcgagaacctcaccgaaatcaacgtcaccagccccacctgcattcgcgagatcgacaacgcatttggcacgaacatcggcgaaatgttgatggccgccattgagcgcaagctgcaagccaagtgatatagaacagccggacacgcaccaacattgcgctatcatgccccacctgtgaaacgcgcgatgttggtttttttgtcatgacactcccgtccgaactgccccccgaactctcccacagcggcgtgcgcccggctgatcggctcggatttaccctgttcctggcggcgttgattcacttggccctgatcctcggcgtgggctttaccatggtcgaacccaagcaaatcacccagaccctagaaatcaccctcgccacgttcaagagcgaaaagaagcccgagaaggccgacttcctcgcccaggacaaccagcagggcagcggcaccctcgacaagaaagccgtgcccaagaccaccgaagtcgcgccgttccaggacaataaggtcaacaaagtcaccccgccaccggcgcccaagccggaggtcaagcaggcagcgcccaagccagccgtgaccaccatcgcccccaaaccgcagaaagccccggcccaacgcgaaaaaaccaagaccgaacccacgcccgagcccgtaaaaccggcgccgactttcgacagctcgaccctgtccgacgaaatctccagcctcgaagccgaactggccaatgaacagcagctgtacgccaagcgcccgcgcatctaccggctgaatgccgcctcgaccatgcgcgacaaaggcgcctggtataaggacgaatggcgcaagaaggtcgagcgtatcggcaacctcaattacccggaggaagcccgacgccagcagatttacggaaatttgcgtctattggtgtcaatcaaccgcgacggcacattgtatgaagtgcaggtgctggaatcgtccggccagccgctgctggaccaggccgcccagcgtatcgtgcgcctggccgcgccctttgcgccgttcagcggcgacttgaacgacgtcgaccgcctggaaatcatccgcacctggaaatttgccaagggcgatcggctgtcgagcaattgatgacaattgccgcctgtggcacatcaccagcttgtcagttcgcccctcccccgccacactagcggacatgaaaaatgtcagcccgacctacctcaagcaccacttcctgatcgccatgccccatatggccgacccgaactttgcgcaaaccttgacctacatcgtcgagcacaccgccaagggtgcgatggggttggtagttaaccgcccgcaggcgctgaatttggcggatatccttgagcaactgcgccccgagatcgacccgccggcccgttgccagggcgtgccgatctatattggtgggccggtgcagaccgatcgcggctttgtgctgcaccccaccgggccgaagttccaggccacggtcgatcttgacggcgtatcgctgtccacttcccaggacgtgttgttcgccatcgccgatggcgtgggccctgatcaaagcgtgatcaccctcggctacgcgggctgggaagccggccaactggaggcagaactggccagcaatgcctggctgacctgcccgttcgacgccgacatcctgttcaacaccgtcagcgaactgcgcctggacgcagcggcggcgacgctaggaatcaacctcaacctgctgaccagccaggcggggcacgcctgatggctttgcgtctgatccttggctttgactacggcaccaaacagatcggcgtagcggtcggccaggtgatcaccggccaggcccgcgagttgtgtaccttgaaagcccagaatggcgtgccggactggaaccaggtcgaggccctcataaaagagtggaagcccgacgcggtcgtggtcgggctacccctgaacatggacggcacccccagcgacatgtgcctgcgcgccgaaaaattcgcccgccgactcaatggccgctacaacctgcccttctatacccacgacgaacgcctcaccacctttgaagccaagggcgagcgccgtgaccgtggcggacaaaagggcagctaccgcgacaacccggtagacgccatcgccgccgccctgctgttgcagggctggctggatgaaaacaccgctttatttgaatcctgactgacgcggcttgccgcgtctttttacgtttgagcccggtccttgcctgcgcgaggcctagaaggagcccccatgagcctgccgaaccccgccgaactgatcagccagatggccaccagcctcacggcccatctgcaacaccgcaacatcagcgagccacgcttcatcggcattcgcaccggcggtgtgtgggtggcccaggcgctgctggaagcactgggcagcgagtcgcccctgggcaccttggacgtgtccttctaccgcgacgacttcagccagaacggcctgcacccgcaagtgcgcccgtcggccctgccgttcgagatcgaaggccagcacctggtgctgatcgacgacgtattgatgagcggccgcaccatccgcgccgccatgaacgaactgttcgactacggccgcccggccagcgtgaccctggtgtgcctgctggacctggacgccggcgaattgccgatcagcccggacgtagtcggcgccaccctgtcgcttgaagcccatcaacgggtaaaattgctcggtcccacgccgctcgtactcgaactgcaagacctcgccctttaaaccgccttgtaaagagtccccgcgatgacgcctctagatgccaagcgcccgctgcagctcaatgctcagggccagttgcaacacttcttgtccctcgacggtttgccccgcgaactgctcaccgaaatcctcgacaccgccgactcgtttctcgaagtcggtggccgggcggtgaagaaggtcccgctgttgcgcggcaagaccatctgcaacgtgttcttcgagaactccacccgcacccgcaccaccttcgaactggcggcccagcggctgtcggccgacgtgatcacgctgaacgtgtccacctcatcggcaagcaagggcgaaaccctgctcgacaccctgcgcaacctggaagccatggccgccgacatgttcgtggtacgccacggcgactccggcgctgcacacttcatcgccgagcatgtgtgcccgcaggtggcgatcatcaacggcggtgacggccgccacgcccacccgacccaaggcatgctcgacatgctcaccatccgtcggcacaagggcagctttgaaaacctctcggtggcgatcgtcggcgacatcctgcactcgcgggtcgcgcgctcgaacatgctggccctcaaagccctgggttgcccggatatccgcgtgatcgcgccgaaaaccctgctgcccatcggtatcgaacagtacggcgtgaaggtctacaccgacatggctgcaggcctgaaggacgtggacgtggtgatcatgctgcgcctgcaacgcgagcgcatgaccggtggcctgctgccgagcgaaggcgagttcttccgcctgttcggcctgaccaccgcacgcctggccggcgccaagccggatgccatcgtgatgcaccctggcccgatcaaccgtggcgtggagattgagtcggcggtggccgacggtccgcagtcggtgatcctcaaccaggtgacctacggcatcgccgtacgcatggccgtgctgtccatggccatgagcgggcaaaccgcgcaacgtcaattcgagcaggagaacgcccagtgaagctcagcatcctcggcgcccgcgtcatcgatccggccagtggcctggatcaagttaccgatctgcatctggaagccggcaagatcattgccattggcgcggcgcccgcaggcttcaacgccagcgagaccatcgacgccaaaggcctggtggccgcgcctggcctggtcgacctgaacgtcgcactgcgcgagccgggttacagccgcaagggcaacatcaccagcgaaacccgcgccgccgccgccggtggcgtgactagcctgtgctgcccaccgcacaccaagccggtgctggacacctcggcggtgactgagctgatcctcgaccgcgcccgtgaagccggcaactgcaaagtgttcccaatcggcgcactgagcaagggcctggaaggcgaacaactcgccgagctgatcgccctgcgcgacgccggttgcgtggccttcggcaacggtctggaaagctttcgcagcacccgcacgctgttacgtgccctggagtacgcggccactttcgacctgacggtgatcttccattcccaggaccgtgaccttgccgaaggcggcctggcccatgaaggcgccgtggccagcttcctcggcctgccgggcatcccggaaaccgccgagaccgtggccctggcccgtgacctgctgctggtggaacaaagcggcgtgcgcgcgcacttcagccagttgaccagtgcgcggggcgtggccttgatcgcccaggcgcaggcccgtggcttgccggtgacggcggatgtggcgttgtaccaactgattctgacggacgaagcgctgatcgacttctccagcctgtaccacgtgcaaccgcccctgcgcaccctggccgaccgcgacggtttgcgcgcagcggtgaaatccggtgtggtctcggcgatttccagccatcaccagccccatgaacgggatgccaagctggcaccgtttggcgcgacagagccgggtatcagcagtgttgaactgttgctgccgctggcgatgacgctggtagaggatgggttgctggacttgccgacattgttggcacgcttgagcagcggcccagccgaggccctgcgtctgccggcgggcaagttggcggtgggttcggcggcggatctggtgctgtttgatccggccagctccacggttgccggggaacactggctgtccaggggtgaaaactgcccgttcatcggccatagcctgccggcgacggtgcgttacaccctggtggatggacgtatcacctaccaggcctgatagacatccaatgtgggagggggcttgcccccgatagcggtagatcagtcagcttatctgtagctgacccactgcaatcgggggcaagccccctcccacatgttgatctccaccagaagttaaagatcagcgaccgctgttgcgctcggcattgcggatcgatatctgcgtattcaacgtccagaagtcatacagcacccccaccaggaacaaaccgccggtcagcaggtagatcaggccggagatccatttgccctggtacatgcggtgcacgccaaacaccccgagaaacgccagcagaatccaggccacgttgtattcgataggcccggcggtaaatcgcaggtccgcttcacggtccatggccgggatcaggaacaggtcgatcagccagccgatacccagcaagccaaaggtgaaaaaccagatcgtaccggtcaccggcttgccgtaatagaagcggtgcgctccggtaaaaccgaaaatccacagcaggtaaccgatcaccttgctgtgggtgtcttgctgctcgccaatctgctgataggtgttcatcgcgtacctcttttgcctcgatagataaattttttcattttctttgtgacttttttacgggcgcccgacgtacggcaaatggtatcttccctgccctgaaagccttatgccacctgacttgtgtaggacaattgcggcgaatcgtcgcgtttttcctgattttgacgtcaaggttcagtcgacaaacggcctgagaacgacacaaaaagctgttataaagttgcgcgcaaacccataagagccacgcctaatgcgaccatttttcaagacatggctaaccatttgcctattaatgccactggccgcccacgccaccaatcgtgagcaacgacttcccaacgttaacggtttcacccctaaagtccacagcacgccaagcaccgccaagtcggtcaagctgaccgtcaaccgcccgactcaactgagcaaggcccacggtaaagccacggccggcctggtaggcgtcaacaccaagcagagcagcaccgtgcttagccgcgccgtcaacgtgctcggtactccttatcgttggggcggcagcagcccaagtaaagggttcgactgcagcggtttggtgaaatatgcgttcaacgacgtcgccgctgtggatttgccgcgcacttccaacgccatggccgctggccacgggcagaaggttgatcgcaaggacctgaaaccgggtgacctgctgttcttcaaactgaagagtcgccaggttaaccacgttgccatctacctgggcaacgaccgcttcatccacgcaccgcgccgtggcaaagcggtcagcatcgacacgctgaaaaagccgttctgggacaagaactacgtgattgccaagcgggtgctgcctaaagagcagaacaacctgcgggtcgtgcagcgctgattccaggctggaatgcgataaacaatgtgggagggggcttgcccccgattacagtgggtcagctacaaataagctaactgatccactgctatcggaggcaagccctctccctcatttggagcttcatatatccccaggcaccctcgccttctgctgcgcctcttcccgactgatcaccccctccccgaccaacgccctcaagctcatatccagcgtcttcatccccaacgccccaccggtctgtatggccgagaccatctgcgccaccttgtcctcacggatcagattgcggatagccggcgtgcccagcatgatttcatgggccgccacacgcccgccgccgatcttcctcaccagcacctgggacaccaccgcctgcaacgactccgacagcatcgagcggatcatggccttttcccccgccggaaacacgtccaccagccgatccacggtctttgccgccgacgaggtgtgcaaggtgccgaacaccaggtgcccggtctcagccgccgtcagggccaggcggatggtttccaagtcgcgcagttcacccaccaggatcacgtccgggtcttcccggagcgccgagcgcagggcaacggaaaagctgtgggtatcgcggtgcacctggcgttgattgatcaacgccattttcggcgtgtggataaattcgatggggtcttccagggtcaggatgtgctggcgccgatgccgattgagaaaatcgatcatcgccgccagggtggtggacttgcccgagccggtggggccggtcaccagtaccaggccgcgcggcagttgggcaatacgctggaatacttcccccaggccgaggcgctccaggctttggacctcggacgggatggcacgaaacaccgcgcccatgccacggtcctgccggaacacattggcgcggaaccgcgcgacaccgggcagctcgaaggcaaaatccgtttcaagagatgtttcgaaatccttttgttggtgctgattgagcaatgggctcaacaagtccgccacttgcgggggtgaaagcaccggcccatccagcggccagacctcgccatccacccgcagcatcggcgccaggccggcggacaaatgcaggtcggaggcgccacggcacacgctggccgtgagtaattcagtgatatccatagggctttccatttccagtagaatgccgcggactccatatccacgggcgcatcttgaatgtcgacgatagcagacaacatcggccaggttagccagcgcatccgcgccgctgccgacgccgtgcaacgtgacgcaagcagcatccacctgctggccgtgagcaagaccaaacccgcgcaggcagtgcgcgaagcctatgccgccggcatgcgcgactttggcgagaactatctgcaggaagccctgggcaaacaggccgaattaaccgacctgcccttgagttggcacttcatcggccccattcaatcgaacaagacgcgcgctatcgccgagaacttcgcctgggtgcattccgtggatcgcctcaaaattgcacaacgcctgtccgaacaacgcccggccgacctgccaccgctgaacatctgcatccaggtcaacgtcagcggcgaagccagcaagtccggctgtacacccgccgacctgccagccctggccaacgctatcagcgccctgccgcgcctgaagctgcgtggcctgatggcaatccccgagccgaccgaagagcgcgccgcgcaagacgcagccttcgccaccgtgcgcgagctacaagccagtttgaacctggcgctggacacactttccatgggcatgagccacgaccttgagtcggccattgcccaaggcgccacctgggtgcggatcggtaccgccctgtttggcgcccgcgactacggccagccatgaaatggctgacttccatttagctaaggacctgtcatgagagacacgcgtatagcctttatcggcgccggtaacatggcggccagcctgatcggtggcctgcgggccaagggcctggatgccgcgcagatccgcgccagcgacccgggtgccgacacccgtgcccgcgtcagcgccgagcacggtattgaaacctttgccgacaacgccgaggccatccagggcgtcgatgtaattgtgctggcggtgaagccgcaggccatgaaggccgtgtgcgaaagcctgcgtccaagcctgcagccgcagcaactggtggtgtccatcgccgccggcatcacctgcgccagcatgaacacctggctcggcgcccagccgatcgtgcgctgcatgcccaacacccctgccctggtcagccaaggcgtgagcggcttgtacgccaccgccgaagtgagcgccgaacaacgcgaccaggcgcaagagctgctgtccgccgtgggcctcgccctgtggctggagcaggaacagcaactggacgcggtcaccgccgtatccggcagcggcccggcgtatttcttcctcctgatcgaagccatgaccgccgccggcgtgaagctgggcctatccaaggacgttgccgaacaactggccgagcagaccgccctgggtgctgcgcgcatggcggtgtccagcgatgtggatgccgccgagctgcgccgccgcgtgacctcgccgggcggcaccacacaggcggccatcgagtcgttccaggccgggggctttgaagccctggtggaaaaagcattgggtgccgctgcgcaccgctcggcggaactcgccgaacaactgggcaaataaggagccaacatgattggtttgaataccgcagccgtctacgtgctgcaaaccctcggcagcctctacctgctgatcgtcctgatgcgcttcgtactgcaactggtgcgtgcgaacttctacaacccgctgtgccagttcatcgtcaaggccacccaaccgctgctcaagccgttgcgccggatcatcccgagcctgttcggcctggacatgtcgtcgctggtactggcgatcctggtgcagttggccttgatggcgctgaccctgctgctgacctacggcaccaccggcaacttcgtacagttgctgatctgggccatcatcggcgtgaccgcgctgttcttgaagatcttcttcttcgccctgatcatcagtgtgatcctgtcctgggtcgcccccggtagccacaaccctggcgccgagctggtgaaccagatctgcgagccggccctggcgccgttccgccgcctgctgccaaacctgggcggcctggatatctcgccgatcctggcgttcatggtgctcaagttgctggacatgctggtgatcaacaacctggcggccatgaccgggatgccggagattttgcgtctgctgatctgacgcaaagcaaatgtgagaggggcggtacgacgattcggcttgcccccgataacggtgtaccagccaccatttgtagtgactgacagactgctatcgggggcaagccccctcccacatttcaaaccgctcaggccattgcttgccgctaggtgcagcggtctttagacttacgcctcatttaaacgagagcagggtcgatgccagctgcctttccccccgattctgttggactggtcgtgccccaagtggcgcacttcagcgaaccactggccctggcctgcggccgttcgctgcccgcctacgacctgatctatgaaacctatggccaactgaacgccacggcgagcaacgccgtgctgatctgccatgccttgtccggccatcatcacgcagccggtttccattcggtcgacgagcgcaaacccggctggtgggacagttgcatcggccccggcaagcccatcgacaccaacaagttctttgtggtcagcctgaacaacctcggcggctgcaacggctcaaccggccccagcagcctcaacccggaaaccggcaagccattcggcgccgacttcccggtgctcaccgtggaagactgggtgcatagccaagcgcgcctggccgaccggctgggcatcagccagtgggctgcggtgatcggcggcagcctgggcggcatgcaggcactgcaatggaccatcacctacccggaccgcgtgcgccactgcctggcaatcgcctcggcccccaagctgtcggcgcagaacatcgccttcaacgaagtggcgcgccaggccatcctcaccgacccggagttccacggtggttcgttccaggaagccggcgtgattcccaagcgcggcctgatgctggcgcggatggtcgggcatatcacctacctgtccgatgactccatgggcgagaaattcggccgtggcctcaagagcgagaaactcaactacgacttccacagcgtcgagttccaggtggaaagctacctgcgctaccagggcgaggagttctcggggcgtttcgatgccaacacctacctgctgatgaccaaggcgctggactacttcgacccggccgcccaccacgacgacgacctggcgaaaaccttcgaaggcgccacggccaagttctgcgtgatgtcgttcaccaccgactggcgcttctcgccggcccgctcccgcgagctggtggacgcgctgatggcggcacgcaaagacgtctgctacctggagatcgatgcaccgcaaggccacgacgccttcctgatcccgatcccgcgttacttgcaggcgttcggcaattacatgaaccggattactgtgtgagaacgccatgagagccgacctggaaatcatccaagactggatccccgccggcagccgcgtgctcgacctgggctgcggcgatggcgaactgctgagctggctgcgcgacaacaagcaagtcaccggctacggcctggaaaacgactcggacaacatcgcccagtgcgtggccaagggcatcaacgtgatcgagcaggacctggacaagggcctgggcaactttgccagcaacagcttcgacatcgtggtgatgacccaggcgctgcaggcggtgcactacccggaccgcatcctcgacgaaatgctgcgtgtaggccgccagtgcatcatcaccttccccaacttcgggcactggcgctgccgctggtacctggccaccaagggccgcatgccggtgtcggacttcctgccgtacacctggtacaacacgccgaacatccacttctgcaccttcgaagacttcgaagccctgtgcagtgagcgtgaagccaaggtgatcaaccgtcttgccgtcgatcaacagcatcgtcacggctgggcgagtaaactatggcccaatctgttgggcgaaatcggtatctaccgggtcagcagtcctggcctgacggaccacaagattgccgtctaatcatcttcaagagggacgctcatgagtcgtttggctatttttctattgaccgcctgcctgggcgccaacgccatggccgcggacgctatagacgctaaccgcaagaaagacttcggcgatatcaccgtccactacaacacgttcacctccagcttcctgcaaccggaaaccgcccaggccgtcggcgtggtgcgcagcaaggagaagggcctgatcaacgtgaccgtgatcaagggcgtgaccccggtggccgcgcaagtgaccggcaccatcaaggacttgggcggcaagagcgaagtcctcaccttcaaacagatcaacgagaaaggcggcatcaattacctggcgccctactccgtgacgcagcgcgaatacaagacgtttaccatcaacgttgaaaccggcggcaaagcccatagcttccagttcaaccaggaactgtttccggcggaataatgaacctcacccaactcgtactggccagccataacgccggcaaactcaaagaactgcaagccatgctcggtgactccgtgcaactgcgctccatcggcgagttcagccaggtggagccggaagagaccggcctgtcgttcgtcgagaacgctatcctcaaggcgcgcaacgccgcacgtatctccggtttgccggcgctggcggatgactcggggctggcggtggacttcctcggcggcgcgcctggcatctattcggcacgctacgccgacggcaaaggcgatgcagccaacaacgccaagctgctggacgcgctcaaggacgtaccggacgccgaacgcggcgctcagttcgtctgcgtgctggccctggtgcggcacgccgatgacccgctgccgatcctctgcgaaggcctgtggcacgggcgcatcctgcatgccgccagcggcgagcatgggtttggctatgacccgctgttctgggtgccggagcgtaacgtttccagtgccgaactgagcccggccgacaagaaccagatcagccaccgtgctcgcgcaatggatttgctgcgccaacgcctgagcctgaaatgacccagaacacctctgcgcagccgctgatccacggcggcgcgcaaacacctcgggcggccttgcctgtgctgccgcccctggcgctgtacatccacatcccgtggtgcgtgcgcaaatgcccttattgcgacttcaactcccacaccgccagcaaagtgctgccggaagaagagtatgtggacgcgctgctggcggaccttgatcaggacctgcacgccgtgtatggccgtgagctgagttcgatcttcttcggcggcggtacgccaagcctgttcagcgccgcagcgctggggcggctgctcaagggtgtggaagcacgcatcccgtttgccggcgatatcgagatcaccctggaagccaaccccgggacgttcgagcaagaaaagttcgtggcctatcgcaagctggggatcaatcgcctgtccatcggcatccagagcttccagcaggcaaagcttgaggccctcggccgtatccacaatggcgacgaagccgtacgcgccgccggcatggcgcgccaggctggctttgataacttcaacctggacttgatgcacgggctgcccgatcagtccctggacgatgccttgagcgacctgcgccaggccatcgctttgaagccgacgcacttgtcctggtaccaactgaccctagaacccaacaccgtgttctggaaccagccacctgcgctgccggaagacgacaccctgtgggacatccaggaagccggccaggcgctgctcgccgagcacggttacgcgcaatatgaagtgtcggcgtatgcccaaccgggtcgcccggcgcggcataacctcaattactggagcttcggtgactttatcggcatcggcgccggcgcccacggcaagctcagccacccggacgggcgcatcgtgcgcacttggaagacgcgggcaccgaaggactacctcaacccggccaaaagcttccaggccggcgcgaaggaactgaccaacgaagagctgccattcgagttcctgatgaacgccctgcgcctcaccgaaggcgtcgatgccaggctctacgccgagcgtaccggtctcgatctggcgagcctcgatgaaggccgccgcgaggcagaacaaagtggcttaatgcaggtcgaaccgtcacgcctggcggcgaccgaccgcgggcaactctttctcaatgatctgttgcagaagtttttgagctgacgctcttaaggaaatcgaatggatttggtactcgacctgctcgccaccgtgtcccgctggagccgtagcaacctgtcggaaatctccctggccctggtgggctgcctgttggtgctgtttggcgccgacatcaagggctggatcgaagcacgcctgggcagcatcgcgggtgcgttgcgcgtgccgttgatggcgctggtgtgcatgatcggcagcggcgcggcgttgatttatgccacgccgtggattgtgcgggggttgagccagttcaataactacagcctggcgccggtgttgattgtcgtactggtgttgatcggcgtagtcgcagaccgccgctgatcctgagcaaaacgtcgatacaaatgtgggagggggcttgcccccgatggcggtggaccagtcactctatggggtgactgacactctgctatcgggggcaagcgccctcccacatttgattgcattgcaactcagaggcgagttacgccagcttctcgaacttcaaatcccacaccccatgccccagccgctcaccacgacgctcgaacttggtaatcggacgctcggccgggcgtggcacgcatttgccgttttcagccaggttgcggtagccaggggccacgttcatcacttccagcatgtattccgcatacggctcccaatcggtggccatgtgcaggatgccgcccactttcagcttggtgcgcaccagttccgcaaaggaggcctggacgatgcggcgcttgtggtgacgggctttgtgccatgggtccgggaagaacagcatcagacggtcgaggctgttgtcggcgatgcagcggttgagcacttcgatcgcgtcgcaatcgtagacccgcaggttggtcaggccttgggtcaacacgccgttgagcagcgcgccgacacctggccggtggacttcaacgccgatgaagtcctggtccggcgcagcggcggccatttccagcagggagtggcccatgccgaaaccgatttccagggaacgcggggccgaacggccaaacacctggtcgtagtccaccggcgcgtcggccaatggcaacacgaacaacggcgtaccttgctccaggcccttttgctggccttcggtcatacgaccggcgcgcatcacaaaagtcttgatgcggcggtgcttggactcgtcgcctgcttccagggtgttcggcgtttcgtttgattcagtcatcaatggctcttacttgatcagaccatccagcggcgaggaggcgctggcgtagagttttttcggcatgcggccggcgaggtaggccaggcggcccgcgacgatggcgtggttcatggcttcggccatcaggatcggttgctgggcgtgggcgatggccgagttcatcagcaccgcatcgcagcccagttccatggcgatggttgcgtcggaggccgtgcccacgcccgcatccaccagcaccgggatcttggcttcttcgaggatgatctgcaggttgtagggattgcagatacccaggccggaaccgatcaggccggccagtggcatcaccgcgatgcagccgatttccgccagttggcgcgcaatgatcgggtcatcgctggtgtagaccatcacgtcgaaaccttccttgaccagggtttcggcggccttgagggtttcgatcacgttggggaacagggttttctggtcggccagcacttccagcttcacaaggttgtggccatcgagcagctcacgggccaggcggcaggtgcgcacggcttcaatggcgtcgtagcaaccggcggtgttcggcaggaaggtgtagcggtccggcgacagcacttcgagcaggtttggctcgccttcgatctggccgaggttggtgcggcgcacggcgaaagtgacgatctcggcgcccgaggcttcgatggccaggcgggtttcttccatgtcgcggtacttgccggtgccgaccagcaggcgggactggtaggtacagccggccaggacgaaaggcttgtcgctacgaacgatgctcatgggaaatcctcgaaatggggtgaggttctgcagaattcaggaagctgcgcgatcagccgccgccgatggcgtggaccacttcgacctggtcgccttcggcgagcgcggtctcggcgtgcaggctacgcgggacgatatccaggttgagttccactgcgacgcgacgcccggtcaggtccaggcgggtcagcagggccgcaacggtttcaccgtcgggcagttcaaaggattcgccgttcaactgaatgcgcatgccacgggccgtcatcgtttttaggggtcggcattctagcccgattgaggttgccggcccaagtcccttggtcaggctgcctgcaaacgccacgccgccaggcccaggaagaaccagccgagcaggaaggcaaggccgccaaacggcgtgatgatcccgagtttgctgatgccggtcagggtcagcacatacaggctgccggagaacagcaggatgccgacggtaaacgagatgcccgcccagctgaccaatcggccaggaatatgcgccgccagcagcgccacgccgaacagtgccagggcgtgcaccaactggtaggtcacgccggtgtggaagatcgccaggtactcagcgctcaggcggtttttcaggccgtgggcggcgaaggcgccaagggcgacaccggtgaagccgaaaaaggcagccaacatcagaaagccacgcagcatgaggaactccagtcagactcatagggcagggtctgtataatggcccgctcaacgggttcggccaagccatctctatgctgcgtctcctcttcaaacgctttctcaacgtcgtcaaatggtttgccatcggcagtgtgctgctggtgctgctgtttcgtgtcgtcccgccgcccttcaccgcgctgatggtggagcgcaaggtcgaatcctggttcgacggcgagcccattgacctgcagcgcacctgggtgccgtgggacgagatctccgatgacctcaaagtggcggtgatggctggcgaagaccaacgcttcccgcagcattggggctttgatttcggcgcgatccaggcggcgatcctgcacaacgagcgcggcggctcgattcgcggtgccagcacgttgagccagcaagtgtcgaagaacctgtttctgtgggccggccgcagttatctgcgcaaaggcctggaagcctggtttaccgggttgatcgaggtgttgtggcccaagcagcggattcttgaggtgtacctcaatagcgtggagtgggacgaaggggtatttggggcggaagcggcggcgcggcatcactttggggtgagtgccaaggggttatcgcggcagcaggccagctatctggcggctgttttgcccaacccacgggtgtggagtgccagtcatccgacggcgtatgtggcgcggcgcgctgcttggattcggcagcagatgggtcagttgggtggagacggttacctggttgaactgaacaactcccgcaaggccccctggtccgactgacacaacaaaaacaaatgtgggagggggcttgcccccgatagcgatggaacagtcaccttgatgttgactgacactctgctatcgggggcaagccccctcccatatttttaggctgcgatggacagtttcagcttgttcatcgcgcttttctcaagctgacgaatccgctcggccgacacgttgtacttctgcgccaggtcatgcagcgtggccttgtcttccgccagccagcgctggtagaggatgtcacggctgcggtcgtccagcacttccagcgcttcatgcaggttgtggttggagttgtcgctccagtccgcatcctccagttgacgcgccgggtcgtagcgatggtcttccaggtagttggccggcgattggaaggcgctgtcgtcgtccgcttcagcagcggggtcgaaggccatgtcatggccggtcaggcggctttccatctcgcgcacttcacgcggctccacgccgaggctttcggccacgcggtgcacttcctcgttgttcagccacgccaggcgtttcttctggctgcgcaggttgaagaacagtttgcgctgggccttggtggtcgccactttcacgatgcgccagttgcgcaggatgaattcgtggatttccgccttgatccagtgcacggcaaacgacaccaggcgcacacccatctcggggttgaagcgctttaccgccttcatcaggccgacgttgccttcctggatcaggtcagcctgggccaggccgtagccgctatagctacgggcgatatgtacgacaaaacgcaggtgggcgagcaccatctgccgagccgcccccaaatcctgctcatagtagagactctcggccagttcacgctcctgctcgggcgtcagcaatggaatgctgttgaccgtgtgcacataggcttccaggttcgcacccgggaccaaggcataagcaggttgcaaagaagtggtcatacgaaaaaacctccgactcacataactcgtgcagtgaagcactgcgaaaattgaccgggaaccgtaggacaagttccctaaaccaccaatacggtcaatacaaacgaaaccacattaatctgacattaactacttcggtgccagctcacgtaaatgacgagcgaccgcaatccacgcaccgatataccccaacaataccgcgccaagcaagagactcagaccatcggctaccggcacgccggccagggcgaaatcactgccgtagagtccggcaagcccgacaaccgcgtcgttcagccagtccaggccaaaagccagcacgccccaggacaaaatcccggcaccgaagccataaagcgcgcccatgtacagaaaaggacgacgcacatagctgtccgtgccgccgaccagtttaatcacttctatctcggtgcgacggttttcaatatgaagacgaatggtattacctatcaccaaaagtaatgcagacaccaacagcaccgtcaggccgaacacaaaccggtcgcccagcttgaggatcgccgccaggcgctctacccagactagatcaagctgcgcctgctgtaccttgggcatctctgcgagtttttgtcgcagggcctccagcgccggcttatcgacttcgttcggcgtcaccagcaccacgcccggcagcgggttctgtggcagctccttgagcgcctcgcccaggccggactgttgctggaactcttccagcgcctgatcgcggctgatgtactcggcatccgccacgccggggatgttcttgatgtcgtcgcgtaacgcttcgccatctttggcactggcgtcgatattcaggtacagcgaaatctgcgctgcgcgctgccaggaaccgcccaggcgctccacattattaagcagcagcgacaaacccatcggcaggctcagggccaccgccatcaccaggcaggtgaaaaagctgccgatcggctgtttgcccaggcggcgcaggctgtcgaccaggctggcgcgatggctctcgatccaggcgcgcagcaaggtgctgaaatccggaccgtcgtcatcatgctcgtgttttttcttcggcggttgcgggtcggccggtttcggcgccacgcgttcggagactttagggctgcgtgttgcactcatacgccggcctccccgtcaccgatcaggcggccgcgttgcagggtcagcatgcgatggcgcatgcgtgcgatcagtgccaggtcgtgactggcgatcagcacgctggtgcccaggcggttgatgtcttcgaatacgcccatgatttcggccgccaggcgcgggtcaaggttaccggtgggttcgtccgccagcagcagcgccgggcggtggacgatggcgcgggcgataccgacgcgctgttgctggccggtggagaggtcgccggggtacaggtcggtcttgtccgacaacgccacgcgctccagggccgaatccacgcgcttgacgatctcggccttggacagcccgaggatctgcaacggcagcgccacgttattgaacacggtgcgatcaaacaacagctggtgattctggaacaccacgccgatctggcggcgcaggaatggaatctgcgcattgctgatggtggccaagtcctgacccgccagcagcaacttgccagtggtcgggcgttccatggccagcagcagccgcaacaaggtacttttgccggcgccggagtgcccggttacaaatagaaactcgccgcgccgtactcgaaagctcagctcatgcaagccgacatgcccgttggcatagcgtttaccgacctgttcgaatcgaatcatgaacgctcccgctcggcaaacagtgcctgtacaaagggttcggcttcaaaggtgcgcagatcgtcgatgccttcaccaacgccgatataacgaatcggcaacccgaactgtttggccagggcgaagatcacaccgcccttggccgtgccgtcgagcttagtcaatgccaggccggtcagttgtaccgtctggttgaattgtttggcctggctgatggcgttctggccggtgccggcatccagcaccagcaggacctcgtgcggcgcgtctgcgtcgagcttgccgatcacccggcgaacctttttcagctcttccatcaaattgtctttggtgtgcaggcgaccggcggtatcagcgatcagcacgtcgatgttacgggccttggcggcctgcacggcatcgaagatcaccgaagcggaatcggcgccggtgtgctgggcgatgaccgggatcttgttgcgctcgccccacacctgcagctgttccaccgcagcggcacggaaggtatcgccggctgccagcatgactttcttgccttcggactgcagcttcttggccagcttgccgatagtggtggtcttgccggcaccgttgacgcccaccaccaggatcacgaaaggcttcttcggggtgatcaccagcggcgcttccaccggcttgagcatcgcggccagctcggcctgcagggatttgtacaacgcgtcggcgtcggtcagctgcttgcgcgcgaccttctgggtgaggctctggatgatcacggcagtggcttcaacgcccacgtcggcggtgagcaggcgggtttcgatgtcttccagcagttcgtcatcgatgaccttcttgccgaggaacaggctggccatgccttcgccgatactggcgctggttttgctcaggccttgcttgaggcgggcgaagaagccggtcttgctggtttcggcaggggcgacgacgggctccggctcgacaaccgcaggcacggccacctcggccacagccggaatcggcggggcgatgtgctcagcctgcacatcttcgaccagcgccacgggctcttcagccaccggcagttccggccacggtttgtgctcgggttccggctcaggttccgggaccgcctcgacgaccggctgcaacaccggctcggccatcggcaacaccaccggcgccggggtttcggcaaccggttcggcttctactatgggttctgggataggttcaggcagaacctgcggctgttcgtcgacggtttcctgcggctttttgcgcagccatccgaacaggcctttcttctcgccagccgcagctggggtcttcttgtcgtcgttggaaccaaacatggagacggctatctcaaggtagcgacgcgccaaggggcgcgtcggtaaataaaattcgatgcgtaacagactgttttttagccagctcgttcatgcgcaacattttgtaaggcctaaatagggcctaaacaagactgccgcagtggccgtccgtaaatccgaccagtatcctagcacctcctcgcccgccgacgctaagaccaagcgggcagcccaacaggtttaaaaacgaatgaatgctctagcccgccgcgccgcaggcctgctgttcagcacagtttgtctgcctctttcagccatggctgccgacccacaacccacccatgaattcaccctggacaacggcctcaaggtggtcgtacgcgaagaccatcgcgcgccggtggtggtttcccaggtctggtacaaggtcggttcgagctacgaaaccccgggccagaccggtttgtcccacgccctggaacacatgatgttcaagggcagcgccaaggtcggccccggcgaagcctcgctgatccttcgcgacctgggcgccgaagagaacgccttcaccagcgatgactacaccgcttattaccaggtgctggcccgtgatcggctgggcgttgccttcgagctggaagccgaccgcatggccagcctgcgcctgccggccgacgaattcagccgcgaaatcgaggtaatcaaggaagagcgccgcctgcgcaccgacgacaacccgatgtccaaggcctacgagcgcttcaaggccatggccttcccggccagcggctaccacacgccgaccatcggttggatggccgacctggaccgcatgaaagtcgaagagctgcgccactggtaccaatcctggtacgtcccgaacaacgccaccctggtggtagtcggcgatgtcaccccggacgaggtgaagaacctggccaagcgctacttcggcccgatccccaagcgtgatgtgccaccggccaagatcccgatggaactggccgagcccggcgagcgcctgctgacgatgcatgtgaaaacccaattgccgagcgtgatgctgggctttaacgtgccgggcctggccaccgccgaagacaaacgttcggtgcaggccctgcgcctgatctcggccttgctggacggcggctacagcgcccgcatctcagaacagttggagcgtggtgaagagctggtttccgccgcctccaccaactacgacgcctacacccgtggcgataccctgttcatgctgagcgccacgccgaatcagcagaagaagaaaaccgtcgcccaggcagaagccggcctgtggcgcctgctggaagagttgaaggccaagccgccgaccgccgaagaactggaacgcatccgcgcccaggtcattgccggcctggtctaccagcgtgactccatcaccagccaggccacggccatcggctccctggagaccgtcggcctgtcctggaaactgatggacacggagctcgccgacctgcaaagcgtgaccccggaagatatccagaaagccgcgcgcacctatttcacccgcgaacgtctgagcgtcgcccatgttttgcctgaggagaccgctcatgagtgatcgcaaaagcagccgcctgatcttccccggcctcgtcgtcgttaccctgatcgccgccagcgccgtgtacttcctgcgccccagcgactccgtcgccagcccggcattggaaaaagcccaatcgagcaaccagctgcaatccctggcggaactggacggcaaggcgccgaccaaccgcaagctcgacgttcagacctggaccaccgccgaaggcgccaaggtgctgttcgtcgaagcccatgaactgccgatgttcgacatgcgcatcctgtttgccgccggcagcagccaggacggcaacgtaccgggcctggcgctgatgaccaacgccatgctcaacgaaggtgtaccgggcaaggacgtgagccagatcgcccgtgatttcgaaggcctgggcgctgacttcggcaatggcgcttaccgcgacatggcgctggtgtccctgcgcagcctcagtgacagtagcaaacgcgacgccgccctgagcctgtttgaccaggtgatcggcaaaccgaccttcccggccgactccctggcccggatcaagaaccagatcctcgccggcttcgagtaccagaagcagaaccccggcaagctggccagccttgaactgttcaagcgcctgtacggcgatcacccctacgcgcacccgagcgaaggcacgcccgaaagcgtgccgaagattaccctcgcgcagttgcaggcgttccacgccaaggcttacgcagcgggcaacgcggtgattgcggtggtgggtgacctgacccgcgccgaagccgaagccatgacggccaaggtttctgcatcgctgcccaagggcccggcgctggcgaagatcgcccagccgaccgaacccaaaccgggcctgagccgaatcgagttcccatccaagcaaacccacctgctgttcgcgcaactgggcatcgatcgtgccgacccggactacgcagccttgtccctgggtaaccagatcctcggcggcggcggtttcggcacccgcctgatgagcgaagtgcgtgaaaagcgcggcctgacctatggcgtgtactccggcttctcgccgatgcaggtgcgcggcccgttcatgatcaacctgcagacccgcgcggaaatgagcggcggcaccctgcgcctggtcgaggacgtggtggccgattacctcaagaccggcccgacgcaaaaggaactggatgacgccaaacgcgagctggccggcagcttcccgctgtcgaccgcgagcaatgccgatatcgtcgggcagttgggcgcgatgggtttctacaacctgccgctgacctatctggaagatttcgtgaaacaatcccaggccctgaccgtagagcaggtcaaggctgcaatgaacaaacacttgagcgccgacaagatggtcatcgtgaccgccggcccgacgattgcgcaaaagccactaccgccccccactgataaacccgccgagcagccgctcggggttccggagcattaatggccagttcatctcgcccgaaaaaacctgtccacaacgtgcataacggggtgggccagctgcgcatcattggcggcgaatggcgcagccgcaagctgagcttccccgacgtcgtaggcctgcgcccgacgccggaccgcgtgcgtgaaaccctgttcaactggctcgcgccgtacatcgccggcgccaaggtactcgacccgttcgccggcagtggcgcgctgttcctggaggcgctgtcccgtggcgccgccctgggccaggcgctggacgccagcaatgtggcggtgtccagcctcaaggaacacctgggcaccctgcgctgcaccaccggccaggtgcaaaccgccgacgcgctgcgctatctcgaaacccagccggccagcgaattcgacgtggtgttcctcgacccgccgttcaaccagaacctgctgccgagcgtgtgcgcgttgctggaagaacgccaatggctggcagcggattcgtggatctacactgaaagcgagaccgcgccttctaccctgggcttgccggccacctggcggctacaccgggaacaaaagtccggacgggtgtattacgcgttgtggcaacgcagcgccgcctgacctctgtttgtggcgagcgggcttgccccgcgttgggctgcgnnnnnnnnnnnnnnnnnnnnnnnnnnnnnnnnnnnnnnnnnnnnnnnnnnnnnnnnnnnnnnnnnncgcagcccaacgcggggcaagcccgctcgccacagttaaatgcatccgcagcagagcgtgtcatgaccccttcttccgacctgttcacccccgccttcggcctcggcaacccccacctgcagacactgtgggggccgctgtggcgccccaccacccacatcgaacgccaacgcgaacgcctgtggctggacgacggcgacttcctcgacctcgactggcatggcccccatgacgcgcaagcaccgttggtgctggtgctgcacgggttgaccggttcctccaactcaccctacgtggccggcctgcaaaaagccctggccgcgcaaggctgggccagcgcggcgttgaactggcgcggctgctcgggcgaaccgaacctgttggcgcgcagctatcactccggcgccagcgaagacctggcggcggcgattgcccatctgcgggccaagcgaccgctggcgccgctgtatgcggtgggttactcactgggtggcaatgtgctgctcaagcatttgggcgaaaccggcgaggcatccgggctgcaaggcgcggcggcggtgtcggtgccgttccgtctggaccaatgcgcagaccgtatcggcctgggcttttcgcgggtctatcagaagcatttcatgcgggagatgctggcgtatatccgcgtcaagcaacgccgttttctacaggacggccgggcggaagggttgaagacgcttgaagccctgggctcgttggagaagatgcgcacgttttgggacttcgacggccgggtcaccgcgccgttgcatggtttcctgagtgccgaggactattaccgccgcgcgtcgagccgctattacctgggtgatatccgcacgcccaccctgatcatccaggccgccgatgacccgtttgtgtttgcccacagcctgcccgaggccagtgagctgtcggactgcaccgagttcgaattgctggccaagggcgggcatgtcggttttgtcgatggaacgttgaagcgccccggttactatctggagcgccgtattccggcctggttactcagtcgccggtagcgatggcccgcgccggatcggtgatccactcgctccacgaccctgcatacaacttgcccaatgggtaacccgccaggctcagggcgaacaggttatggcacgccgtcactcctgaaccgcaatacgccaccagctcatccggcgagcgcccctgtaatttttcggcgaagcgttgcttgagctgctcggcgggcaagaagcggccgtccggacccaggttttcgttgaatgccgcacactgcgccccagggatgtgcccggcaatcgggtcgatgggttccacttcaccacgaaagcgcggctgggcgcgggcatcgatcagggtcaacccgggttggcccaggcgtttttgcaggtgctcggcatccagcaccaggcgattgtccggcgtaccgacaaaggtgcccggctcaaccaccggtgcgtccaggctcagcgggaacccggccgcatgccaggccttgaggccaccatccagaataaagacgccatcacgcttgcccagccaggccagcaaccaccaggcccgtgcggcataggctccggggccgtcgtcatacaacacgatatcggtgtcggcgttgatcccccaggcacgcaattgctcggcgaaggcatctgcctccggcaacggatggcgaccggtcacacccttggtcaccggcccgctgaggtggcgctccaggtcagcatactgcgcgccctcgatatgcccttcggcatagctgcagagcccgtagtccgggtcttccaaggcaaaacggcaatcgaggatcaccagcccggccgacttctggcgctcggccagttgctgggggctgatcaattgggcgagcggcatgacggactcctatgagcagattcgggaaaggtcctacttcacttcttccaatgcctgattcaacggcacgtaaaattctttgaacaaggcatcgacggcctccttcgcctggggcgtgacaaaccccgcctccagcaccagcacctgatacaccccgcgcttgatcgcctcggcgctcaaatgtgcagagttttcattggtggtgcacagaaagcgcacccaggaggtgaggatgatccaggcattgagggtcagggcttcggtttgcaccgggtccatattgaggatgccagcgtcgacaaacccttggtaaatggcgccgccctgggtcaggcagcgctgggaaaaacgccggtagccggtggccagttccgggtcgctttccagcaggtgttcgaggtcgcggtgcaggaaacggtagcgccacatgccggccagaacggcctgcaggtagaagcgtttgtcttcgacggtgacggcgcggccttggggcgggcgcaggaaactgtccaccagggcttcgtattcgcgaaacagcacggcgatgatcgcctgcttgttggggaagtggtagtacaggttgcccggcgaaatttccatgtgggcggcaatgtggttggtgctcacactgcgctcgccctgctggttaaaaagctccaggctggtttgcacaatgcgctcgctggtctttactcgtggtgccataggggatcagcttctgtacacgtgataaggcatcttacggcctatccttgcacggataaaaccggatgttgctgcaatgttatttgacaatttagagtaacgactctaaaaatccaggcagacctataacaatcgggaacgccgccatgtctgccaacgttgcctatctgcaagattcccaggcactggaccagctccagcacctgttcgatacccagcgccgcgcctacgccgccaacccgatgccgccagccacgcagcgccagcaatggctcaaggccctgcgcgatctgctcagcgacgagcgccaggcgctgatcgacacgatcagccaggacttcagccaccgcagtgccgacgaaaccctgttcgccgaactgatgcccagcctgcatggcattcactatgccagcaaacacctcaagggttggatgaaaccttcccggcgggctgtaggcattgccttccaaccggcttcggccaaagtcatctaccaaccgctgggcgtagtcggggtgatcgtgccctggaactacccgttgtacctggccatcggcccgctggtcggcgctctcgccgccggcaaccgggtgatgctcaagctcagtgagtccacacccgctaccggcgaattgctcaaggcgctgctggcgaaagtcttcccggaagacctggtgtgcgtggtgctgggtgaagccgaggtaggcatggcgttttccaagctgcccttcgaccacctgctgtttaccggcgccaccagcattggcaagcatgtgatgcgtgcggcggccgaacacctcacgccggtcaccctggagttgggcggcaagtcgccggccatcgtgtctgcggatgtaccgctcaaggacgccgccgaacgtatcgccttcggtaaggcattgaacgccgggcaaacctgcgtggcgcccgactatgtattggtgccggaagaccgcgtcgacggtttcgtcgaggcctacacccaggctgttcgcgggttttatccgaccctggccgacaacccggactacaccgccatcatcaacgaacggcaactggcccggctgaatgcctacgtcaaggacgccaccgacaagggcgccaccctgattccgctgtacgaccagggccaggcgcggcgcatggcccacagcctgttgctgaatgtcagcgatgacatgaccgtgatgcaggacgagatcttcggcccggtactgccgatcgtgccgtatcgcggtatcgaccaggcctttgcctatatcaaccaacgccctcgcccactggccctgtactacttcggctacaacaagcgcgagcaggaccgcgtgctccacgaaacccactccggcggcgtatgcctgaacgacacgctgctgcatgtggctcaggacgatatgccctttggcggcatcggcccgtcgggcatgggccactaccacggccacgaaggcttcctgacgttcagcaaagccaagggcgtgctggtgaagcagcgcctgaacgcggcgaagctgatctacccgccctacggcaaagctatccagaagttgatccagaagctgttcgttcgctgaaaccgccacccacgggataacaataacaatgaaccctagcctgactgattcacccgcgctgtcgcggcgcggcgtcttgaagattggcctgtgcgccagcgccttcctggcgaccgccgggttgggcgccagcctcagcggttgctccagcagcacgccggccagcggctttgccatgctgcgagccagtgacctgccgttcctgcgcgcggtgatcccggtgctgctcgaaggcgtggccagcgcccaggaagttgccagcgggattgaagacacccttaagaagctcgactacagcctgcaacacctgtcgccggagatgttcaagctcacccagcaactgttcgacgtattgggcatgggcgtcacccgtgggccgttgaccgggatctggggcagttgggaaaacgccagcggcgagcagatacgcaacttcctgcaccgctgggaaaacagctacctgaacctgctgcgcatgggccagggctcgctgctcaagctggtgatcatggcctggtatttccagccggcgtcctgggcgcattgcggttaccccggcccaccgaagatttgattcgccgcccccccataaaaacaagagacgaccctgatgcccgtacccgacctgttccgcgacggcatggcccgtggctggaaaacccacaatggcgccgcgctcgataacgacctgaccctggaagccgatgtggcgatcatcggcagcggcgccggtggcggcaccactgccgagattctcagcgccgccggctacaaggtgctgctgatcgaagaaggcccgctcaagaccagcagtgacttcaaactgctggaagacgaggcctacgccagcctgtaccaggaaggtatcggccgcatgagcaaggacggcgccatcaccatcctgcaaggccgggcggtgggcggcactacgctgatcaactggacgtcgagctttcgcaccccggacgccaccctcgcccactgggccagcgaatacgcggtgaaaggccacagcagcgccgagatggcaccgtggttcgaaaagatggagcagcgcctgggcatcgcaccgtgggccatccccccgaatgccaacaacgatgtcatccgcaaaggctgcgaaaagctcggctacagctggcatgtgatcccacgtaacgtgcgcggctgtttcaacctgggttattgcggcatgggctgcccagtcaatgccaagcagtcgatgctggtgacgaccatcccgtccaccctggaaaaaggcggagagctgttgtacctggcccgcgccgagcgcctcctctataaaggcgacgctatcagtagcctggaatgcgtggcgatggacgagcgttgcgtggcgcctaccggacgcaagatcaccgtgaaggccaggcattacgtgctctccggcggcggcatcaacagcccggcgctgctgatgcgctcggatgcacccgacccgcactcgcggctaggcaagcgtacctttctgcatctggtgaacttctccgccgggctgttcgacgaggtgatcaacccgttctacggcgcgccgcagtcgatctattccgatcactttcaatggcaggacggcactaccggcaaaatgtcctacaagctggaagcaccgcccctgcatccaggcttagccagcaccttgttcggcggctatggcacgcagaacgccttggacatgagccaattgccgcatacccacgccatgcttgcgctgttgcgtgacggttttcaccccgacagccagggcggcagcgtggatttacgcggtgacggtacgccggtgctcgattatcaggtctccccctatgcctgggacggcctgcgccgggcgtttcacagcatggccgagatccagttcgcggcgggcgccaagtcggtcaagccgctacaccacgacgcgcggttcgtgaacaccttggccgaggcacgccgtgtgattgacgggttgaacctggaactgcaccgaaccacgctaggcagcgcccatgtgatgggcggctgcgccatgggtgaagacccgaaaaacgcagtggccgacagcctgggtcgccatcaccagttgcgcaatctgtcgatccacgatggttctctattccccaccagcattggggccaatccacaattatcggtgtacggtttgaccgcccaactggcgacagcgttggccgaacgtctgaaaacagcgtgaaaaaacacagtattcgccgtgtctatagtgctttcttctgcataagttgactttcccgaccgggacggctgcgataccatccggttccccaacggactccgccaggacgacgcgatgaaccgagtgttgtacccaggtaccttcgacccgattaccaaaggccatggcgatctggtcgaacgtgcctcacgcttgttcgaccatgtgatcatcgcggtcgcagccagccccaagaaaaacccgctgtttcccctggaacagcgcgtggagctggcgcgtgaggtcaccaaacacctgcccaatgtggaagtggtgggcttttccacactgctggcgcatttcgccaaggagcagaatgccaatgtgttcctgcgcggcctgcgtgcggtgtcggacttcgaatacgaattccagctggccaacatgaaccgccaattggcgccggacgtggaaagcttgttcctcacgccgtcggagcgttattcgttcatttcctcgacgttggtccgtgaaattgccgctttgggcggagatatcaccaagttcgtgcacccggccgtggcggatgcactgaccctgcgcttcaagaaataagcccccaatcggcgcctgctcgcactgcgggcgccaatgcggcacaattgcgcgcattagttttcagatgccttggctgacagccctggcaggagtttccatgtccctgatcatcaccgacgattgcatcaactgcgacgtctgcgaacccgagtgcccgaacgccgcaatttcccagggcgaagagatctacgtgatcgacccgaacctgtgcacccagtgcgtcggccactacgacgagccgcagtgccagcaggtttgtccggtggattgcattccgctggatgaggcccatccggaaacggaagagcagctaatggccaagtaccggttgattaccggtaaagcctaagactggcacttggggcaaaacacactcgcccgctgtcccagcaccacattgcgcaattcgctgccgcagaccttgcacgcctcgccgccccggccatagacgaacagttcctgctggaaataccccggttgcccgtcgccgccgataaagtcgcgcaacgtggtgccgccacgctcgatggcagccgccagcacgcgcttgatctcgatcgccagcttcaaataacgtgctcgtgagataccgccggcctcgcgacgcggatcgatccccgccgcaaacagcgcttctgtcgcgtagatattgcccacacccaccaccaccgcgttgtccatgatgaacggcttcaccgccatcgaccgcccacgggacagctggaacagacgctcaccgtcaaacaggtcggtcagcggctccggccccaggcggatcagcagttcatggttgtgcgggtcctggctccagagcatcgcgccaaaccgccgagggtcggtgtagcgcaaggccaggccggactccagttcgatatccacatgctcatgcttggccgctggcatgccaacctctaccaggcgcaagttgcccgacatgccgaggtggctgatcaaggtgcccacttcggcattgatcaacaggtacttggcccgccgctccaccagcacgatgcgctggccggacaggcgcacatcgaggtcttccgggatcggccagcgcaagcgtcgctcgcgcaccaccacgcggctgacccgctggccttccaggtgcggcgcgatcccgcgccgggtggtttcgacttctggtaactcgggcatgtgtacctcttgaaggaaggatcagtgggcgcccagttcgcggatcgacaacttcatgctctcgaagtcgtagtccgacagccccacgtaatccagcaccaggtggccgatggcgttccactcatggtccaccgcctggttacccagcacgcggtaggacgagcagatgtgctcggccattttcaggatcgccagcaggttcttcaattgcgaattgcgcgctgactcatcactgaaaatcgccagggcgttgtggtggttggcgatggcgtcagtcacatgctgcggcaggcgccaggatttcgcggtgtagtagccaaccaccgcatggttggtgttgaacgcgttgttctcggtatcgaccacgcggcaatcggggccggcatttgcatacgcctgctccagcaccgacatgtagttggggaagcgcttgagcatcaacggcacgccacagtcgtggaacaggcccagggcataggcctcgtccaccgcctgggcgccggtgcgcttggccagggtgaggcaggtcatggccacatcctgggcggtgtcccagaagcggttgagggtgacgatggtgtcgtcgctcatctcgcctttgatcgacagcgcattgatcaggttgatgatcgagcggctgcccagcaggttcaccgcgcgctggatcgaagcgatcttgttactcaggccgtaatacgacgagttgacgatcttcagcaacgcgccggacaggcccgggtcctgggagatcagccgtgcgatcacttccaggtccggatcgggcatgtattgctccatctgcaaatccaccatgatttgcggctggggcggcacgctgatgccttgcagggcctgttggatctgttcggcggaaagctcttgggacataagtacacactctgggctaggcggggattctaacccctaagcaaacctgaccgacacccaaatgcccgattgaaaccggactaaatgtgggagggcgcttgctcccgatggcatcaccgccatacgtcagatacaccgcgccgcctgcatcgcgggcaagcccactcccacatgaaccgcgccgcaacaggtatactcccgctcttttttccggagcgacgtcatgtccctgccaagcctgcgtctcaaagccaacgccgatcgtcgtttgcgcaacggccacctgtgggtctacagcaacgaaatcgacgtggccgccaccccactccacggcttccaggcgggcgaccaggccatcctcgaagcggccggcggcaagaccctgggcatcgtggccatgagcccgaacaacctgatctgcgcccgcctgctgtcgcgcgatatcaagttgccgctggacaagtcgctgctggtgcaccgcctgaacgtcgccctgtcgctgcgcgatcgcctgttcgacaagccgttctaccgcctggtctacggcgattccgacctgttgccgggcctggtggtcgaccgtttcggtgacatcctggtggtgcagatcgcctcggcgaccatggaagcgcataaagaagacgtgatcgccgccctgacccaagtgctcaagccaagcggcatcctgttcaagaacgactccgccgcgcgcgacgccgaaggcctcaaccgctacgtcgaaaccgtattcggcctggtgccggagtgggtggcgctggaagaaaacggcgtgaaattcgaagccccggtaatccagggccagaagaccggctggttctacgaccaccgcatgaaccgcgcccgcctggccccgtatgccaagggcaagcgcgtgctggacctgtacagctacatcggcggttggggcgtgcaagccgcagccttcggcgccagcgaagtgttctgcgtcgacgcctccgccttcgccctcgacggcgtggagcgcaacgccgcgctgaacggctttgccgagaagatgacctgcatcgaaggcgacgtctttgaagcgttgaaagaactgaaagccagcgaagaacgcttcgacgtgatcgtcgccgacccgccggccttcatcaaacgcaagaaagacatgaaaaacggcgaaggcgcttaccgccgcctcaacgagcaagccatgcgcctgctcagcaaggacggcatcctggtcagcgcgtcgtgctccatgcacctgccggaagacgacttgcaaaacatcctgctgaccagcgcccgtcacctggaccgtaatatccagatgctggaacgtggtggccagggtccggatcatccggtgcacccagcgattgccgagacgcggtatatcaagagcattacgtgccggctgttgccgaatagctgatgccgttggcctgtaggggcctccgggttcctacaggctttcaggaagtttcgccccgcaccaggttttgactttcctctgctcaggctcgatcctcgaccccctcacggaatcgaggctcgcgcatgtcgacggcaatcacacaggctgaaaaacccttcattgttttctggctgatgaccatgaccctgctgggcgtcttcccgcttgacgtcgtgctgccctcctttcccgccctggcggaacacttctccacctccaccacccaggtcgcccgctcggtcagcctgttcgccattggcttttcatgcgccatgctgttgatcggcccgctgtccgacaggatcggccgcaagaagctgctactggccagcatgctcgtcgcaatcatgggtgcggccgggtgtttaaccgccagcacgactgcccaattcctgttctttcgcgtcatccaggccatgggttgcggcggtttcatactgtcccaagcgttggtgcaggaccttttcttcggcagagaacaagagcggttgcggatcgccatggctacggccgggggaattttcatttcggtttccccgctgctgggcgcgtggctgcaactgcacggggggtggcaagccagcttctatgtgtttatagcgctctgtgcagccaccctgatcatggctcaccggctactccatggcggcttgcctcaagcggcaccaagccgccaaagcatgttcaaggcctacacaaaggtcttcgccagccggcacttcgccagctatgccacgatctccgcgattaccttcgcctgtcatttctcgttcatcgttgtgtcaccgctgattttcatggaccagttgcagctgacgccccacgaatactcgttgaccctgctcctctacggcgccgcttatgtactgggcggtgtcagtgcgggcttcttgcacaagcgactaccggccgcgacccagatggccaccgggctggtgctgatcgcgatctcgggcatcgtcatgctggtcctcgcctatcagttcggcttatcaaccccgacggtgctggtgcccatgctgctctgcacagcaggcacgaccatcacccgccccatttccaattccaaggccatgagcttgtttccggacaatgcagggacggcggcctcagcggtggcggcagtgctattcattgccggtggtcttatcagtgcattcatcagcacctttacccaccatctgagtaccgcgctgggtctgtgctttctgatgctgagcgccgtcgccctggccctgaacgcatgggcgcggcgtcacccgcacgtcccgtagccgctatcttcacggtttcggtcattccctcccgccgccagcggtgtagaatcggccctattcatcgccagtcatcccccggcgggtttatgagctcgaggcccaagcacgcggcgatcccgcgacgcgagtggcaacttccggacacacggccatttttcgggtgttccagtagtgaaatagaagctcactcccctttagtacttgattagccgcccggagtgctccatgccagattaccgctcgaaaacatccacccacggccgcaacatggccggcgcgcgcgcactgtggcgtgccacggggatgaaagatgacgacttcaagaagccgatcatcgcgattgccaactcgttcacccaattcgtacccggccacgtccacctcaaggacctgggccagctggtcgcccgcgagatcgaacgcgccggcggtgtcgccaaagagttcaacaccatcgccgtggatgacggcatcgccatgggccatgacggcatgctgtattccctgccgagccgcgagatcatcgccgactccgtggagtacatggtcaacgcccactgcgccgacgccatcgtgtgcatttccaactgcgacaagatcacccccggcatgctgatggccgccctgcgcctgaacatcccggtgatcttcgtgtccggcggcccgatggaagccggcaagaccaagctcgcttcccacggcctcgacctggtcgacgccatggtcatcgccgccgattccagcgcttctgacgagaaggtcgcggaatacgagcgcagcgcttgcccaacgtgcggctcgtgctccggcatgttcaccgccaactcgatgaactgcctggtggaagccctgggcctggccttgccgggcaacggctcgacactggccacccacagcgaccgcgaacaactgttcctggaggccggccgcaccatcgtcgagctgtgcaagcgctactacggcgagaacgatgagtcggtgttgccgcgtaacatcgccaacttcaaggcgttcgagaacgccatgaccctggacatcgccatgggcggttccaccaacaccatcctgcatttgctggccgccgcccaggaagccgagatcgcgtttgacctgcgcgacatcgaccgcctgtcccgccacgtgccacaactgtgcaaagttgcgccgaacatccagaagtaccacatggaagacgtgcaccgcgccggcgggatcttctcgatccttggctcgctggcccgtggcggcctgctgcacaccgacctgccgaccgtgcacagcaagtccatcgccgaaggcatcgccaagtgggacatcacccagaccgacgacgaagccgtgcacaccttcttcaaggccggcccggccggcattccgacgcaaaccgcattcagccagtcgacccgttgggacaccctcgacgacgaccgtgaaaacggctgcatccgcagtgtcgagcacgcctactcccaagaaggcggcctggccgtgctgtacggcaatatcgccctggacggctgcgtggtgaaaaccgccggtgtggatgagtccatccacgtgttcgaaggccgcgccaagatctacgaaagccaggacagctcggttcgtggcatcctcgctgacgaagtgaaggaaggcgacatcgtgatcatccgctacgaaggcccgaaaggcggcccgggtatgcaggagatgctgtacccgacgtcctacctgaaatccaagggtctgggcaaagcctgcgccttgctcaccgacggccgcttctccggtggtacctcgggcctgtccatcggccatgcttcgccggaagccgcagccggtggcgcgattggcttggtgcaggacggcgacaaggtactgatcgacattccaaaccgctcgatcaacctgttgatcagcgacgaagaactggcggcacgccgggtcgagcaggacaagaaaggctggaagccggtggagaagcgtccgcgcaaagtcaccaccgcattgaaagcctatgccctgctggccaccagtgccgacaagggtgcggtgcgtaacaaagcgatgctcgacggcctgtaagcctcgcccatgaaaatgccccgccaagtgcggggcatttttttgcctggcgttctgacgctgtagtttttcatacgccggccgataacaggcgcatctgtattctcaaggaccttacccgcatggatgctcgctcttccgctctacgcccagctgcatgggcgctttccctattggcgttggccggttgcagctcgctgcaaaagcctcaggtggacccaggcctggcactcttcaacgaagccatgacactgccggcgctcgactacaccatcctgcgcaacggcgacagagtcgcgtactccgtcgatttgcagcaaaacccgatctctgtgcagttcgacgcctattgcacacaaggtcctggaaggatgctctaccccacgcgcacgggcctgcgggcatttactccctcaccggcaacaggcgtcgacctgccggcggcacaggcccaacaactgcagcaaagcgctcaattgcagagcgtatgcaaggcacgtcccgtgcccgactggcgggtgctgcaaacctctgccgatcagggctggctgctgatcgaccgtaacagcgtgcagcagcaaggcagtcagatatccgcctgggtcgcacaggattacctgcactatcaggtcgccaagaacgcatcgttgtttactcaacggcaggagcggctgaccctggattgcacacaacgcaccattacgttgatgagccagttcaacctcgatgaaacgcgccagatgatcaacggcgaaatccgtcgacaattcaagccgcaagccttggagcaagcttccggcgaacatgcccagctcttcaaggctctgtgccaggcgccgatggagctggcccagttacccgctttcaaggcgcgccaggcattgccacccgctgccagcgcaacgaatgccaacccagccgtactggcggccatccgagcgctcggcctgcctgcgccaacccgcaccctgagcgagctggcctacgactatgacgccgtgctcttcaacaacacccgcgtgggcgaccagaccaaacagacattcatcagtgtcgacaacgcatcgggtcagacgctggtacaaacacgcgactcggcacttggctttaaccaggagctgaccttccaaggcctgtttgatctggacagccaaggtctcgaccgcaaaaccggcagggacaaggtgaagacccgcctcttggttggcctgagctttcaaggcgattggcgtaacttgcccctcgccagtgaggtgggctacacccagacatggtcaaaatccatcaaccccgatggcagtccttcgccagagaacagcgagccaagaaccgtgacctgcaaggtcgctcgggaaatcccggctgccaccctcaccccggacctgaagggacaagccaaggtactcgactgcgttcagatgaaaggttggacttatcaggcagcctacctgagcgactatgggctgttcatcaaactgcatgagaacgcgttggttgcgcaatggaactggcatttgaaatcggtgaagtgaccccttgtataggcgccgggttctagaactgcggcttgtacgtcacgctgaacatcatgtttcgcgggtcgccgaagtagttgttgcctaccaactggctgtaggacgggatgtagtaacgcttgtccaagaggttgttgaagttcaccgccaaggtgacttcatcactggcatcgtaggcgactcgggaattgaaaattgcaaagccggcctggccaaagttgcggtcaaagctggtggtcgccgtctgtgcattgacccctgcacccaggctgacacggttgaaatcccccggtagtttgtaatcgccccagatccgcagcatgtgcttgggcaccgccgtactgaagaccttacccttcagttcggtgtctttcaaaaacaccgtggtgttgtaggtatagctactgctgacctgcaaacccggcgccaattggccgctgacctcagcctccagcccctggctgcgcaccttgcccgaggcggtggagcagtaccagccactgcaggcgtttggtccatcgatatcggtgctgaagtcagtgacggcgcggttttcgtggatatagcggaacagcgcaagggatgtattgagacgtccatccagcaactcccccttgatccccacctcatagttgcgcccttcgatcggcggcagaccggtcttttgctgggtcaactgggtttgcgggatgaacacctccgcgtagctgccatacaccgaccactggtcgtccagtgcgtacaccaggcccgcaaagggtgtgaccttgccattgctcttgaccgagtttttttcaccaccctcctgatactcacgggcatagtagttgtcttggtcgaaggcgaagtcgtaccaactggtacgagcgccgaggatcaatgtcagaggctccgtcaggttgatccgccaggtgccgtaaagacctttttgggtgatgtcataggtgctcaaggccaagttggcgcgatcagcaatgctgttataggtcggttgtggtcggtgatggtcgatggcaccgatatcggctcccggcgtgaacgcacgggcatagccgtcatccgtgttgtacttggaatagttgccccccagcaccaggctctgcttgaacgacagcgcttcaaaatctccgctgacataggcgtcgaacccgcggttcttgccatagaaatctgtggagtagtcagcgtagttaccgctgcgcgttgagccgaccggcaccgcacccacgataaattgataagtggcttcattggattcattcatcgccagcgcggaggcgttgaatttccagtgatcgttaaagcggtgctcaagatccaggtataccgccgtctgatcgttgaacgagcggttccaacttgctcccgtataggtcgaacgtgacacatccaatgcactgccatcggtgtgacgcggcaaggcgatcaaatacggacggccatggctctttttattgctgaaaccgacccccagggtcgtgtcatcgtccaagtcgaagtccagcgcgccgtacacggtctgctcccaattccacacgtagtcggtgaaggagtggcccttctcatagttgaccacggcgcggccacggatcgtcccggcctcgttcaatgggccgcccacgtccgcctgggacgcataccggtcccaactgccagccttggcgctcaaggttacagtcggtgcagcctggggacgcttgcgcaccagattgattgccccgcccgggctgttggcgccttgcagcaggccagcagcaccacgcaggacttccatgcggtcgtagatcaccatgttctcggtgatgtagctacccaacgcatacacgttacggggtaccggcacgccatcgtattgcagcgattcaatctcgaagccacgcgcaaacatgaacatcccgggccctggcgacttgaccgacgccatgcccggcaccgcttcaatcgcttgggtcagggtggttatgttctggtcatccatcgctttgcgggtcagcacactgaccgattgcgggatgtccttgagcttttgcgtgcccttgccgatggtcacggctccggtggtgtaagaaccgctgccttcggtggtcgtccccaagtggtcagcgctgatggtggtggcgccgacttcgagggcactgccagtgtctacgcgcttttccagggtgacggtgtcggcattgatgaacgccgcgctcagccctgtacctcccagcagcaagcccattgcctcgcgctgccccaagtgaccgctgacacctggcgacaccagcccctgggtcaactcaccattcaccagcacctgcacccgtgtcaccgccgaaaatgccgccagcgcaccgtccaggctctgccccggaatgtcgaatcggtaggtctgggcctgggtggtttcggcggcctgcaggtacagcggcgcagtgccgcaggccatggaaatggccagtgccagcaagggccgtgcggcgaatcggtgtgccatggatagtgctccccggtgcaaaaagtctgtgatcggcgccgcactacttgagagtgcttactatttacgcctcagtgatcaaggacgatggcttgcggggaaaccctgaaaatattttgcaaaagttgccgctaagaggctttgccttcgcgcaacaccagtaaatacggggtgtagtgctcagcgcgcaggttgagggtgtattccagcgctttgatcacggcctcgggtttgtcgatctcgaacacgccggacaccacgcgattacgcagcgaatcgcccagcaccagggtcgtgccaggccagtagcggttcaactcgctgaccacttccgacagcggctgttggcgaaacaccagttgtcgctggcgccaggcaaaaccgctggccgcatcgaaaccgtgcacctcggcaaggcgctcgccctgatattccacggcccgtcccggctccaggtagaccggctcaccggcgcccgcgctgacctgcaccttgccctgcgccacttgcacgcgcgtctgcgcatcccgccttgccacgctgaactgggtgccgaccaccttcacccagccctcgccggactgcaccacgaagggccgcgccgggtctttggtcacgctgaaaaaaccttccccgcgcaacaggcggatctgacgctcaccgccgctcatgcgtacctgaacagcactgtcagtgttgagctgcaactgggagccatcggccaactcgaccgtgcgcgactcgccggtgccggtggcatagtccgcgcgcaggcggtcgagccagggcgtgtgctgcacggtcaacccaaccgtcagcagcaccgcagcggcataagcccagcgccgcgcgggtttgcgccacgcggcctgctcggcgcggcggatcagccgtgccggttcacgcaaaccaccgagcatcgcctgcacttcctgccaggcgtcgtcctggggctggccctgcccgagccaggcggcaaaggcgtccatctcggccggggtcacgtcctcggcctgcaagcggaaataccaggcggacgcttcttcgaacaacacgtcgacagggggtaacgcagtcatgaccgacgtccttgtgtgtcgcaggcgagccgcgtcttgatgtaggcgcggcattcaatcaaggcgcgacgcagttggtattccacgctgcgtggggtgatcgacaggcgttcgccaatctcgcggtaggaaagttcgtcgacatgatagagcaggaagatctgccgagtcgcttcgggtaacgccaggatggcgtcctgcatcagtcgctcctgctggtaggcggccagttgttcgtcggcaccggggttgccgcacggcagctcttcgctgggctcgccggcatccaggcgctcacggcggatggcctggcgctggtgatcgcgcaccaggttgctggcgatggtgaagaggaaggctggcaggttgtcgatcttctcgccggaatccaggcgtgccaggcgcaggaacgattcctgggtcaggtcggcggccacctgagcgctgccggtgcggcgggtgacgaaggcttcgagggctttcttctgctccgcgaacaggcgcgcgatctgcgaattccaggaggacacagcactaccttgagaagaaccgagggttcaggaagtgcgcacgctagcagaggatgagattggttcgcaattgatatctatttttgctgtgacctttagggtgtcaatcagatagctatcgggggcaagccccctcccacagttgaccgagttcacactgtcgaaatgtgggagggggcttgcccccgatcaaagccacctcggacttattggatttcgtcaggcttgacgatcacccagttcttgtccgccgttaccggcaacccttccttggcctgcgccgccgcgtgcttggcgatcatgccgttgagttgggtcatgtacttgtccttgcggttgatccacaaatgcacgccgcccttggccacgtctacatcgtgaaacagcatgtagccatcgctggtcggggtgtcgccacccaccagtaccggctttttccattcgtcgatgtaagtgaggatcgccgcgtgcttgccggccatccaggtcgccggggtccacaggtagggcgtgagttccaggccgaggttggccttctcgtcatacttgccggcggtgatctgtttgcgcgcggtggtcagctcgccggtcttgcggtccttgagcagggtggtcacaccgatgacgttctcgggcttgacgttgtagccgtacttcggatcggcggcgaccatgcgcaccagctcttcggaagcagcggtcatcacgtagacctcgatgccgttttccatcagcttgttgtacagctcggcctggccggtgaagactttcggcggttgcacctcggacttcttaaccgcgtcaccttcgaaataggtaacgggcacgggcttgccagaggccatcagctcatcgacctgcaccttgagttccttgagggtgaaccccgagaacacctgggcaacccacgggtagcagaccatgtcgtccacttcgcagaggcggtagtagtagctgaacagactttccttatggtcggcggtgtctttgaacggcataagcttgagcgacggatcgaggctgtcgcgggtgatcaggcccttgttttccatgtagggcagcagggactcttcgaggtcatagcggtagctggtgttgtccatgtcgaacaccgcgaaattgcccttgttggcgttggcagcgatcattttgttcagttgctcggcggccggggccggccagtgtttcaactcggtggcggccatggttggtccggcaaggccaatgcacaacgcggcggcaaacaatctcgaagcgagcttcatatgcgtttctccctgagtgaaaaacatcgacgctaacaaatccctgtgacagttatcgcccgagcacgaccgcttgcgtcgtgatcgcgccaatggcatgtgcctgagcgtcaaaggcttattccaaaaacgacagtcaccattccatatcggtattaaatcaatatatttcaagctgttaggctttccggttcgcaatcgcaggctcgcgcgattggctgccttctcaacggagcttcaatgaatctgcccctgattctcaacttactggtgttcgtggccctgttgctgggcctggcacaaacccgtcgcacaaactggagcctggccaagaaggtgctgtttgccctcgtccttggcgtggtgttcggcaccgtgctgcacacgatctacggtgacggcaacccggtactcaaggcctccatcggctggttcgacctggtgggtaacggttacgtgcaattgctgcaaatgatcgtgatcccgctggtattcgcgtcgatcctcagcgccgtggcccgtctgcacaacgcctcgtccctgggcaagatcagcttcctgaccatcggcacactgctgttcaccactgcgattgcggcgctgatcggtatcggcctgaccaacctgttcggcctcaccgccgaaggcctggtggccggcacccaggaaatggcgcgcctgcaagtgatccagagcgattacgcgggcaaggtcgccgacctgaatatcccccaactgctgctgtcgttcgtgccggccaacccgttcgccgacctggcccgggccaagccgacctcgatcatcagcgtggtgattttcgctgcgttcctgggggtcgcggcgctgcaactgctcaaggatgacgtggaaaaaggccagaaagtcctcaacgccatcgacaccctgcaagcctgggtaatgcgtctggtgcgcctggtaatgaagctgacgccgtatggcgtattggcgctgatgaccaaagtggtcgccggttccaacctgcaagacatcatcaagctcggcagtttcgtggtggtgtcgtacctggccctgggcctgatgttcgtggtgcacggcctattgctgtccctggccgggatcaacccgctgcgcttcttccgcaaggtgtggccggtgctgacctttgccttcaccagccgctccagtgcggcggcgatcccgctgagcattgaagcgcagacccgccgcctgggcatcccgcaatccatcgccgggtttgctgcctcgtttggcgcgaccatcggccagaacggttgcgccggtctttatcctgcgatgttggcggtgatggtcgcgcctaccgtgggcatcaacccgctggacccgctgtggatcgcgaccctggtggcaattgtgaccttgagttcggcaggcgttgctggcgtgggcggtggcgcaaccttcgccgcgctgatcgtactgccggccatgggtttgccggtgtcactggtggcgctgctgatttccgtagagccactgatcgacatgggccgtacggcgctgaacgtgaacggttcgatgacggcgggggcgattaccagccaggtcatggggcagacggataaggcgttgttgaatgccgatgagcatgcggaattagcgcaagcctgatagatagcaatcgggggcaagccccctcccgcacttgactgggctcacacggtcaacatgtgggagggggcttgcccccgacgcttttaggctttttcccagacttcgaagttgtacgccggcttatcaccttcagctggattctccagattggaaaccaacttccactggccccgatcaaactctggaaaccaggcatccccctccgggctcaacgccacccgcgtcaaatacaggcgatccgcctgctccagcccctgcgcatacaactgcgcaccgccaatcagcatcagctcgtcaacaccttgcgccgttgcccattcctcagcgcgctccaccgcggcctccagagacggaaaaacttccgcaccttccagcgccagatcggtctgacggctaaccaccaggttcaagcgccccggcagcggtcggcccagggaatcccaggtcttgcgccccatgatgatcggcttgccgagcgtggtggccttgaagtatttgaaatcccccggcaaatgccagggcatgctgttgtcgacgccgatcacacggttttcaccgagggctgcgatcaggcttaaagggagagtttttttcatggcgacgagaataccagagccccgagccaggggttatgctccaggctcacaaacacgacaggacaacgcgtgactcctctgcacactctctggctgacagaaaccgtgcgcctgcgtgaagaacacgccggccccctggaagacctggaagccaatcgcctggcccgctcggcaggtggcgatctgccgacgcgtatccagcagcgtgccctgcacctggccgagcgcgatgggctcacgaccgccctcacccgctggttgcaaggcgcacgcctggcgctggtgctgctggcggtcatcgccgtgatcagcggcgcgggcctggcctttgccgcgctgggcaacgggctggtcccggtgaatgtgttctgggccttgggcagcttgctcggcttgaacctgatcctgctgatcagctgggccttgggcctgctgtttgccggtgaacacagcgccagcctcgggcgactgtggttatggctcagcgaaaaactcgcccgtgacgcaaaggctgcgcagttggcgcccgcactcctgctattgctgcaacgccagaaactcaatcgctgggccgtgggtatgctggtcaacagcctgtggttgttggcgttgctcagcgccctggtgattcttcttacgctactcgccacccgccgctacggcttcgtgtgggaaaccaccatcctcggcgccgacaccttcgtcgccgtgacccaggccctcggcaccctgcccgtgctgatgggcttcaatgtgccgagcgtcgagatgatccgtgccagcggcgattccgcgctgaatatcgaaagcgcccgccaagcctgggccgcatggctggtgggcgtgctgctggtctatggcctgttgccacgcttgatcctcgccctgctgtgcctgtggcgctggaagcgtgggcgcgccgcgctgcgcctggacctcaacctgcccggctacagccaattgcgcgagcgcctgatgccgagcagcgagcgccttggggtcaatgatgccgcgcccgaacaactgcatcacatcagcggcggcgtcagcgaactgcaaagcgacggcgcgctgctggtcgccatcgaactggacgaccagcattcctggccgcccaaactgccgcacaacgtgaagaacgccggcgtcctcgacagccgcgaatcgcgtaacaaactgctggagcaactcacgcgctttccgcccgcccgcctggccatcgcctgcgacccgcgccgctcgccggatcgcggcagcctggcgctgatcgccgaactcgcccgcagcgccaccgccacccgcgtatggctgctgcaagcgccgcccggccaggccctggacgccgaacgcctgggcgactggcatgccgcgctgcagcagcttgaattgccctttgccaactgcgcgccgctgaactggctggagaccggtcatgactaagcccctgaaactcgccgtggttggccacaccaatgtcggcaagacctcgctgctgcgcaccctcacgcgagacgtcggtttcggcgaagtgtcccatcgtcccagcaccacacggcatgtggaaggcgcgcgcttgtcggtcgacggcgaagccttgctggagctgtacgacacccccggcctggaagacgccatcgccctgctcgactacctggaacgcctcgaccgccccggcgaacgcctcgacggcccggcccgcctggcgcgcttcctggaaggcagcgaagcgcgccagcgtttcgaacaggaagccaaggtgctgcgccaactgctggcctccgacgccggcctgtatgtgatcgacgcccgcgagccggtactggccaagtaccgcgatgagctgcaagtgctggccagctgcggcaaaccgttgctgccggtgctcaactttgtcagcagcagcgaccaccgcgagccggactggcgcgaagccctggcccggcttggcctgcacgcgctggtgcgcttcgacagcgtggcaccaccggaaaacggcgaacggcgcctgtatgaaagcctggccctgctgttggaaaacgcacgaccgcaattggaacggctgatcctggatcaagaggcgcagagccaggcccgtcagcaaagcgccgcccggctgatcgccgaattgctgatcgactgcgccgcctgccgccgcagtgtggtcaccgaagatgagcaacacgccatcggcgacctgcgcaaagccgtgcgccaacgtgaacaaaagtgtgtggaggcgctgctcaagctgttcggcttccgcccgcaggatgccgccgccagtgacttgccgctgctggacgggcgctggggcgacgacctgttcaacccggaaaccctcaagcaactcggcgtgcgcgtcggtggcgggatcgccgcaggcgcggcggcgggtgccggtgtggatctgttggtcggcggcctgaccttgggcgccgccgccctggccggcgccattgccggtggcgcgctgcaaaccgcgcgcagctatggcagccggctgctgggcaagatcaaaggccaacgcgagctgaccgtggacgacagcgtgttgcgcctgctcgccctgcgccaacgccagttgctcaaggccctgggcctgcgcggccatgcggcgatgcacagcatcaaggtcgacacgcctcaggacaagacctggcgcgaaggcaagttgccggacgcgttgcacaaagcccgcgcccatccgcaatggtcgtcgctcaaccctcaccccaagctcagccaggctgagcgccaggaacaggtcgaagctctggcccggcgcctcgacgaaacctaagccgccagcacctgccgcgccttggccttgagcacctcgaggtcgagcaccggcacgtgcattgccttggcctgctcgtcccaatggcgcatgcgcaggctgatctcgcagagcgggtcttgatcaaacgcccgcgcttcttcctgggtcattacaccgccctggtacccgagcgtacggcgactggcttcgctcaggcgggcgtaatagtccggctggctgaaggtcaggtagcgcttggcttgcacgtgatattccaccagcttggccatgcgctcgctgaagcctgcacgacgcaggtaatcggcgccgagccgctcatggctgaccacgccataaccgcccatgttctcgccgccttcgccgcacaagtgcccgatatcgtggaaaaacgccgccagcaccacttcatcatcgaagccttcggccatggccaactgcgcggcctgggacatgtgctcgatctgcgacaccggctcgccaatgtaatccgctgtgccgtgttgctcgtacaagccgaagacttcgtcgatggtctgttcagaggtcatcacgccgccccccacaaggttgtgatattgcgttcggccatcgccggccccacgctcatgcccacaccggtgtgcatcaacgctgcactcacacccggcgccgctcgcaggaacgaaaacggcgccggcccgcgcgagccgtacacaccctgccagcgctccaccacctggatcttgcagcccagggtctgctcggccaactcgatcatccagtcatccacctgctcggcattgaacggcgatgcatcgctgccgtagtcatgggagtcaccgatgatcagttcgccatggggcgtggggctgatcagcaaatggatgccgtgttcgtgcaggtgtggcgcttcacgcaggatctgcgcctggatcggcgccgcttccgggagatcggcgaaagcgccgtagtgcacgcagctcaagccggtgagcaaggcgtgttgcaggttcaggttcaccgctggccgcgcgcgcagcatttgcaggcgacagatgctcgggttgagttcggccatcgcttcggccagcagagtctggtagtcgtggccggagcacacgatgatctgttcagcgcgaaagctgcctgccgtgctgtgcaactggcccggttcgacgtcgcgcaccagggtggagaagtagaactccacgttcagctcttgcgccaggtagttgatcagcgccgggatcgcttcacgcgaatacaactgctggtcatccttgccgtgcaacgcggcgcggtgatggcggaactggccgccgtacaggtccttcatcgcggagccttgcagcaactcgacgtggtagccgtgctcctgcgcacggccagcgcagaacgcttccagtagatgctcttcggcttcggtacgggcgaacaggtatgagccgttgcgcttgagttgcagcccggccacctgcgcccaatggccccagatttcgcggctttctcgcgccaggtcgagcatcggcccaggtggttgaccggtcaccagggcctggccgaagttgcgcaccgaggcgcccagcggcgtggcgctgcgttcgaagaccttgaccttgaggccgcgcctggcggcggcaaaggcgtgggacaggccgaggatgccggcgccgatgatcagcaggtcgctgtggtgtgtcatatcgtgatgtcctgttttgcagaccgccatcgggggcaagccccctcccacagttcgatttgcgaatgccatcagtgtgggagggggcttgcccccgataaggccagtagccccaacgaaaaaccttactgcgctgccactttctccgacttgccgtcatagcgcttgcgccattcggtcaggatgctgtcgcggttcttcgacgcccaggcaaagtcgttcttgatcaagcgctgctcgtagtcggccggcaattcggtctgcggcttggcgatgcccggctgggcgagcacggcaaagttgtccttgtacaggtccatggccgccgggctggcggagaagtcggcgagcttctgcgcggcgtccttgtgcgcggtgcctttgatcacggcggtggcttcgatgtcccagcccaggccttccttcggcaggatgatgtccaacggcgcgccctggcgtttcagctggacggccgggtattcaaacgaaatgccgatcgggaactcaccggaagccgcaagcttgcacggcttggaaccggagtgaacgtactggccgatgttctggtgcaggtcgtccatgtactgccagccctgcttctcgccgaaggtctgcaaccaggcgctgacgtcgaggaaaccggtgccggacgaggccggattgggcatgacgatcttgcccttgtactcaggctttgtcaggtcctgccagctcaccggcttggtcagcccctgtttctcggcttcgacggtgttgaagcagatggtcgcggcccatacgtccatgccgacccaggccggagggttggcggcgtcgcggtagtgcttgccgatcttgtccaggtccttcggcgcgtagttgtccagcataccttgctggtcgaggatcgccaggctggacgcggccaggccccagactgcgtcagcttgcgggcggtctttctcggccagcagcttggcggtgatgatgccggtggaatcgcgcacccacttgatctcgacgtcggggttagcctgttcgaaggcctttttgtaggtcttcaattgctcggcttcgagggccgtgtacacggtcaactcggttttcgcggcaaaggcattcacgctgaatgccgtgagtaccgccgcgaccagcgccaggggcttgaacatggaacacctccttcaggattattggccgggcgcggtctggcgccaggcttgggagcggcgcagtgcgccacgtgaggcccacgccagcagcagcgagacgccggccgacgtgaacaggatcagggtcgacatcgccgccgcaccgcccacgttgccggcgtcgtccatgttcaacacggcgacggcggcgaggatggtgtcggggctgtagaggaagatcgcggcggacacggtggtcatcgccgacacgaacaggtagcgcacgatatccagcagcgccggcaggcagatcggtaccgtcactttcaggtaatgccggtacagcggtgccttgagggacagcgcggcggcttcgaactcggcgtccagctgacgcagcgccgtggtggcggtcatctgggcggtggtcaaatagtgcgcaatggtgcacaccaccagcagggtcatggtcccgtagaacacatgcagcgggttgccgttaaggttgaaaaagaacacgtagcccaggcctagtaccaggcccggcacggccatcggcacgaagctgagcatgcgcagggccaggtttaggcccttctggcccttggttttttccatcaggtaggcgccggtgaagatcagcgcgctgccgatcaatgcggtgcacagggccagggtcaggctgttgcgataggccagccagccgccgccggccgtgtcttcgaactggtaatggttgagggacagcgacaggttgtacggccagaatttcaccagcgaggagtacaccgccatgccgaacaccagcagcaacaccgcgcagatcagcagcacgatggccaggtagcaggcatctctcaggcgcgagggcaccggttgaaacacttgtgcacggccgctcatcgaatcgccgtgacgacggcgcagccaggcatccaccccaaagctgagcagcgccggcagcagcaacaccatgccgatcagcgcaccgcgcccgaactgctgctggccgaccacggccttgtaggcttccagggccagcacctgataatcgccccccaccaccacgggcacgccgaagtcggtgatggtcagggtgaacaccaggcaaaacgcggcgaacaccgcctggcgcgtggccggccaggtgatgctgcgaaacgcccgggccgggctggcgcccatgctggaggcggcatcgaacaggcgtgcatccgccagggacaacgccgacagcagaatcatcaaggcatgtgggaaggtgtagatcacctcccccagcacaatgccccagaaaccgtagatattctccgagagcaacccacgcagcatgccctggttgccaaacaggtagaccagcgcaatgcccggcagcatcgacggcgccatcagcggcagcagcgacataccgcgccagatcgccttgccgggaatcaaggtgcgttgcagggcgtaggcaaacaggtaagccagcggtacgacgatggctgccacgctcagggacactttcaggctattgcccagcagccagtggaagttggcgctggtcaccagctcccgcgccgccaacaggccaccgccctgcccggcctcgctgctgaaaccgcgccagaagatcgccagcaacggcatcaatacagcgatacccaacagcaacagccacagcagtttgccgccgacgacgaaaattctgtcgccggtttcggcgcgggaaacctggcgtggcagcgtcatgacagcggccatctcaggcaaacacctgcaggctgcgcggcggcaaggccacccagatgtcctgggcgcccaggcgcggcatggcttccggggccagttcggcgagcagcgggtggccgggcaattgctccagttcaaagctcatgcggcagcggttgccaaggaaggtgatctcgcgcaccttggccgggaacaggttttcttcatgcaccggcgggttgacgctgatcgcctccggacggcagaacaggcggcccgacttggccacgccagcatcgtcggccaggcgcatgttcatcccgccgacctgggcgtgactggcactgttgcggctgaacggcagccaattgccctggccgacaaactccgccacgaacggcgtggccgggcggtcgtagatctcctggggcgtggcgtattgctcgacctcgccgttgttcatcacggcgatgcggtcggccatcagcatggcttcgtcctgattgtgggtgaccatcagcgtggtgatgcccaggcgccgttgcagttggcgcagctcggtgcacagatgctcacgcacgcgggcgtcgagggccgacatcggttcgtccagcaataacaatgaaggcgcgggcgccaaggctcgggccaaagcgacgcgctgctgctggccgccagacagctggccggggtatttcttttcgctgccgaccaggccgaccagttcgagcatctggccaacacgctggcgcacttcatcacgaccactgccggtgaggccgtagccgatgttcgcttcgacggtgaggttgggaaacaacgcgtaggactggaacaggatgccgtagtcccgcgcctggggcggcagccgggacacatcgcggttgcccaggtaaagctcgccactgtcctggcgttcaaggccggcgatgcagcgcagcaaggtggtcttgccgcaaccggacgggcccagcaggcacaccagctcgccggcggcgacgtccagcgagacgttatccagcgcggtaaacgcgccgaagcgtttctggataccgcgcaccttcatgggcgcgccgggttgggtcagggctgtgttcatgcaaggcacctcatcgaacggatgaaggccatgctaggggggcaatgcgtccctggtgtggcagaaaggcaaaacccggtgatagtggtattggtggatttgggtagggctctcagcgctgagttgcctggtctatcgctatcgggggcaagccccctcccacattcagagcgtgtgaacccgaaaaagtgtgggagggggcttgcccccgatgaggcccgaaaagccaaccaaaaacttaaattggcgacatttcctgcgccagcccaagaaaggccgccggcaaccgcgcgccctttctttccttgaggcagtacagatactcaggaatctgcggtgcattctcgatggtcagcacgcgcaattgcggatcgtgtggcacttcttgccgcgcaatgatgctgatgccaatgttgcgcagcaccgcttcacgaatcgactcgcggctgccgatttccagcagcggtccgaagctcacacctgcgctctgcaacagttcttcggtcaaacgtcgcgtggtagagcccgcctcacgcatcaacagcgtgtgcccggccaatgcgttgagcggcacatggtcgagcttggccaacggatggttgcgatgcaccgccagcaccagcgggtcggtgcccagcacacggcgaatcaggcgtgggtcttccagcagttgcgaggaggcggcgacgtcgacacggtaatcgtccaaggcttctagcacttgttgggagttaccgatttccaccgacacttccacttgcggcaggcgttcacgaaaggctttgaccaggtcgaggatgtagtacggtgccgtggcggcaatcctcagtgcaccctggacctggccattgttgcgtagaaaaaattcgatgtcggcttcttgctgcaacagcgccttgaccatcggcagcagccgcgcgccctcgtcgctgacggtgaggcgacggccgccacggtagaacagctcaacaccgtattggctttccaggttacggatctgggtggtgaccgtgggttggctcaggccgagttttttcgccgcctgggtaatgctgcccaggcgggcgaccatgaaaaaagccttcaactcggcactcagcacaccaccctctcatcgtttatttgcgcaacaggcgcaggccattgaacaccaccagcaggctcacgcccatgtcggcgaacaccgccatccacatggtggccatgcccaggaaggtgaccgccaggaagatcgccttgatcaccaatgccagggcaatgttctgcttgaggatactcgacgtttgccgcgacagacgaatgaaagccggaatcttgcgcaggtcatcgtccatcaaggccacatcagcggtctcgatggccgtgtcagtacccgctgcggccatggcaaaacctatctcggcgcgagccagggccggagcgtcgttgatgccgtcgccaaccatgccaacgcggtgaccttggccgtagagggtttcgatggcttgcagcttgtcggtcggcaacagatcaccctgggcctggtcgatgccgacctgggcggcaatcgcctgggcggtgtgggtgttgtcaccggtgagcatcagagtcttgatgcccagttcgtgcaactgctggatggcttctcggctgctgtccttgaccgtgtcggccacggcgaacagcgccagcgggccggatttgtcgagcagcaacaccacggatttgccttgtttttccagggcgaagagtttctcttccagctccggcgagcacaggcccaggtcttccaccagtcggtggttgcccaggtggtaggtttcgccgttgatctcgccacgcacgccgcgaccggccagggccacgaagttatccacaacgtgggtgggcaggtttttatccacagccgcgttggcgatggccagcgacaccgggtgatcggaacgccccgccaggctggcggccagcgccggtgcgctgtcttcgacgttggggaacagcgccaggtagtcggtttgcaccggtttgccgtgggtgatggtgccggtcttgtcgagggccaggtagtcgagcttgtaaccgccctccaggtacacgccgcccttgatcaggatgcctttgcgcgccgctgccgcgaggccgctgacgatggtcaccggggtggaaatcaccaatgcacacgggcaggcgaccaccagcagcaccagggcacggtagatccagtcgaaccaggcgccggccatgaacagcggtgggatcaacgccacgcccagcgcaaacaggaacaccgccggggtgtagatcttcgagaagctgtcgacgaagcgctgggtcggtgcccgggcgccctgggcctgctccaccgcgtgaatgatgcgcgccagggtggagttgttggcggcggcagtgactttatattccagggagccggcctggttgatggtgccggcgaagactttgtcgcccacggtcttttcaatcggcaggctttcaccagtgatcggcgcctggtcgatggtggattggccagcggtgacttcgccgtccaggccgatgcgctcgccaggctttacccgcacgatggcgccaagatcgatactcttgacctcttgttcagcccaagacccatcagcctgttgcacggtggcctgctcgggcgtcatttgcatcaagccgctgatggcattgcgcgcacggtccagggacttggcttcgatcaactcggccacggtgaacaggaacatcaccatcgccgcttccggccactggccaatcaggatcgcaccggtcaccgcaatgctcatcagggcattgatgttcaggttgaggtttttcagggcaatccagccctttttataggtggtgaggccgccgctgaggatcgacaccagcgccacgatggcaatcacccaggtcggcgcggcgttagtgaagtgcagcacttccgccgccaacgcgccgatgccggacaacgccagcggccaccaatgtttcttggcgggcggttcggcggcgggggtgccttcttcgatgggatcggcctgcatgcccaaggacttgatggcgtcgatgatcggcgcggtactcggcaggtcgtgggtgacgccgaggatgcggttgatcaggttgaattccagctgctgcacacccgcaagcttgcccagtttgttctggatcagcgtctgctcggtggggcagtccatggcttcgatgcggaaggtgctcagccgcgaaccggcggtgggcgcttcgctcaattgcaccaatgccggggccggcgtgccggagcagcaggagccgccgtggccgtggtcatgcacaggggtcaatttcttcgggccatgatcatggtcgtgatcgtgcttgtgcggggtgtggatggaatcgctcattctgtcgcgtccgtaaaggtgcctgttgccaagtaaagaccctgtagccactatagggtcaagcacccatttggagattgttgcgatgaagatcggcgaactggccaaactgaccgactgcccggtggaaaccatccgttactacgagaaggaaggcctgctgccgcccccggcgcgcaccgacgccaactaccgcgtatacacccaggcacacaccgagcggctggtgtttatccgcaattgccgcagcctggacatgaccctggaagaaatccgcagcctgctggggctacgggacagcccccaggaccagtgcgaaagtgtgaatgcgttgatcgacgagcatatccaccatgtgaaggcgcggatcgatgggctgttggtgttgcaggagcaattgctggacttgcgccaacgctgtggcggcggggatcagtgcgggattctgcagcggctggaagtcagcggcagtgtgttggccagtgaggctgagccttcccatgtgggcagaagccacggccattaactcaaacgaagacggttcaaatgtgggagggggcttgcccccgatggggagttccagccacccaatacttagctgatccaccgctatcgggggcaagccccctcccacacaagccacaccttaagaccaggacagccttcagatcgcgacgtcggccttgatgcttgggtcggcgtcgtagcccacgatctcgaagtcttcgaacttatagtcgtagatcgacgcaggtttgcgcttgatcaccagctccggcagcttcttcggcgtgcgcgccaactgggtgcggatctgttccatatggttgctgtaggcgtgggtgtcgccggtggtgacgatgatctcgtgggggatcaggtcgcactgctgggccagcatatgggtgagcaaggccagcgcggcggtgttgtacggcaggccgaggaatacatcggagctgcggatgtacaactgcatcgacaggtgaccgtcgtgcacgaacgcctggtacagcaggtggcacggtggcagggcttgtttgccgttgcgcgcgttttcctgcgggctctgggtttcgtcgggcaggtactcgacgttccagccgtggaacaggatgcggcggctgttggggttggtcttgagggtgtggaccatgtagtcgatctggttgatcgtgccgccgtccttggttggccaggccgtccactgctcgccgtacaccgggccgaggtcaccctcttcggtggcccattcgtcccagatgcgcacgccgttttcgttgagccacttgatgttggtgttgccgctcaacatccagatcagttcattggcgatacttttgaagtgaagcttcttggtggtcagcagcgggaagccgtcggccaagttatgccgatactgacgggcaaacacggccttggtgccggtgccggtgcgatcgcccttggtcaatccattggtcacgacgtcgttcagtagctcgagatattgcttcatgtgggtacccgtatcgttgaagcccaggccagataaagacctgggcattcgaatttaaagcgcggtgttcttcaaaggttgcgggcgattgtacgcccaccacagcaggcccaggccgccgatgatcatcggcaggctgaggatctggcccatggtcacccaaccgaacgccagatagcccagttgcgcatccggcacgcgcacgaactcgacgataaagcggaagatcccgtagaacagcgcgaacatgccggaaaccgccatggtcgggcgcggtttgcgcgagaaaatgtagagaataaggaacagtgccacgccttccaacgcgaactggtaaagctgcgacgggtggcgcggcaattgcgccgggtcgctgaacggcgggaacaccatggcccacggtacgtcggtcggcttgccccacaactcggcgttgatgaagttgccgatacgcccggcgcccaggccgatcggcaccatcggcgcaacgaagtccatcagttggaagaacgacttgccgttacggcgaccgaaccaccaggcggcgatcatcacaccgatgaacccaccgtggaacgccatgccgcccttccacacttcgaagatcagtgtcgggttggcgatatacgccgaaaggtcgtagaacaacacatagccgagtcgtccgccgacgatcacccccatcgacagccagaaaatcaggtcggagagtttctccttggtccaggtcgggtcgaaccggttcaggcgtcgggaggccagaaaccaggcaccgccgatgccgatcaggtacatcaacccgtaccagtggattttcagcggaccgatggccagggccaccgggtcgatctgcgggtaaggcagcattgcgactcctcgttaaatcattcgttaggcgtgcggaccatgccggtgtgcgattaagcctgcgttacagccgctgtttcaaattaagaagttcacacgcaccgaaacgccaggcatgttaacggatggaaggcgtgccgcccaacttcgatacgatggaacgcctgccgctgtatgagtagagtgacaaaaaacacaaaagggatcgcctgatgtgcctgattgtttttgcctggcggccgggccacgcccagccgctgatcgtcgcggccaaccgtgacgagttctacgcccgccccagcctgccgctggcccagtggccggatgcgccagaggtgtacgccggtcgtgaccaggaagccggtggcacctggctgggcgtgaatgccgatgggcgctttgccgccctgaccaatatccgcgacccgcatcagccgccggcccgtaagtcacggggagagctggttgcgcgatttctcaacggttcgctgccgattgatgagtatttagccgacgttaacggccgttcaattgaatatgccgggtttaacctgctggtgggcacgcgggatgagctgtggcattacaacgccaatcacaccgagcccacgcgcttgaaggccggagtgtatggattatccaatgcggggctggatacgccgtggcccaagttgctcaaggccaaggcggcgttgggcgaagtattggcggacccgcagccggaggccttgctggaaatcctgagtgatccgcagacggcaccgtttgccgatttgccggataccggcgtggggttggcgacggagagcctgctgtcgagcgtgtttattgccagcccgagttacggcacgcgggcgagcacagcgctgatagtgaatgccgacggaacgcggcggatggtggagcgcagttttgggccgcatggtgggcggctgggcgaagtcgaaatcaacctataaccacaccgaaacccaatgtgggaggggcaagccccctcccacatttttaaagggttttggcagacgccgggttgatcatccgcgtcagccccaggttcttcagggccaactgcaacgagctgtggataacttgcgggttgtcgatagtcatcaactccgccagcagctccttggccatgctcagttccacctggcgcagcatccatttcaccttcggcaagttggtggcgttcatcgacaggctgtcaaagcccatcgccatcaacaacactgccgccgccgggtcaccagccatttcgccacagatgctcaccggcttgccttcggcatgggcgtcgcgcaccacatgttgcagggcttgcagcaccgccgggtgcaggtagtcgtagaggtcggccacccgtgggttgttacggtccacggccaataggtattgggtcaggtcgttggaacccactgacaggaagtccacctgccgtgccagttccttggcctggtacaccgccgccgggatttcgatcatcacaccaatcggcggcatcggtacgtcggcgccttcgtcgcgtacttcgccccaggcgcggtggataagatgcaacgcctcttccagctcatgggtgcctgaaatcattggcagcaggatgcgcaggttgttcagaccttcgctggccttgagcatggcgcgggtctgtaccaggaagatttccgggtggtcgagagtgacgcgaatgccgcgccagccgaggaacgggttgtcttctttgatcgggaaatacgacagtgacttgtcgccgccgatgtccaggctgcgcatagtcaccggcaacgggtggaaggcctgcagttgctcgcgatagatcgccagctgctccttttcactcgggaaacgctggttgatcatgaacggcacttcggtgcggtacagccccaccccttcggcgccgcgctgttgcgcacgggccacgtcggcgagcaggccggtattcaccagcaacggcacacggtgaccatcggtggtcacgcatggcaactcgcgcaatgaatcgaggcccagcgccagttgcttctcttcctcaaccacttcggcgtattgcttgcgcagcacttcgctggggttggtgaacacttcaccgcgatggccatcgacgatcatgtcgataccatccaccttggaatacggcaggtccaccaggcccatcaccgtcgggatgcccatggcccgggccaggatcgcgacgtgggagttacccgaacccagcaccgagaccaggccaaccagtttgccttctggcacttcgccaagcatggtggcggtcagctcttcgctgatcaggatggtgttgtcggggtagaccaggttggtggtgcgatcttcctgcaggtacgccagcagacggcgaccgaggtcgcgcacatccgaggcccgttcgcgcaggtaggcgtcgtccatcagttcgaaacggttgacgtgatcggtgaccacctggcgcagcgcgccctgggcccattggccggtcttgatcacggtcttgacttcattacccagcgacgcgtcgtcaagcatcatctggtacacgtcgaacagcgcgcgctcttcggggcgcagttgggtggccagcttggtcgacaggttgcgcatgtcggcgcgcacgccttccagggcggtcttgaacaatttgatttcagcgtcgatgtcggtgacggtcttgtccggcaccacgtccagatccgccggcggcagcatgaccaccgccgtaccgaccgcagcgcctggcgaaccgggtacaccaacgaacttggcttcctggatacccttgccttcgcgccccaggccgcgaatcgagccggtggcttcggcgtgggcgataaccccggcgagttgcgcgctcatggtcacgaggaaggcttcttcaccttcgtcgaattggcgacgttctttctgctggatgaccaacacgccgacgacgcggcggtggtgaatgatcggcgcaccgaggaacgaggcgtaacgctcttcaccggtttcggcaaagtagcgataacgcgggtgatcggccgcgttttcaaggttcaggggttcttcacgcgtccccaccaggcccaccagaccttcattgggcgccatgctgaccttgccgatggagcgcttgttcaagccctccgtggccatcagcacaaaacggttggtctcggggtccagcaggtaaaccgagcagacctggctgcccatggcttccttgacgcgcaacacaataatccccaacgccgccttgagatccttggcggagttaacttcctggacgatcttgcgcagcgtattgagcatggctcggggtcgaactccgtcgtcagtcgcgcgctaaaaggcgcggggcaagctctttgagcgcgcgacgataaacctcgcgcttgaatgtcaccacctggcccaacggataccaatagctgacccagcgccagccatcgaactccggtttaccggtcaaatccatccgcacccgctgctcgttggagatcaggcgcaggagaaaccatttctgcttctggccgatgcacagcggttggctgtgggtacgcaccaggcgttgcggcaaacgatagcgcaaccagccacgggtacaggccagaatttgcacatcttcgcgctcaaggccgacttcttcgttcaactcgcggtacaaggcgtcttcaggggtctcgtcggggttgattccaccttgaggaaactgccaggcatcttggttgattcggcgagcccatagcacctgtccggcatcattcgtaagaataatcccgacattaggacggaaaccatcggggtcgatcacggcaacaacctcgcaaacgcatgtcgccgcattgttccacaaaggttgatgaagcggcaacgaggcttcgtaccttatgtgcactcttgtgaaaagaccgtattctggacgcctttttacagacttttcagcgagtaactgcaatgcgcctggctttattcgacttggacaacacccttctcggcggtgacagcgatcacgcctggggcgattacctctgtgaacgcgggattctcgacccggtggcctacaaggcccgcaacgacgagttttaccaggactacctggccggcaagctggacaatgccgcctacctgaacttctgcctggagatcctcggccgcaccgagatggcccagctggacgagtggcacaacgactatatgcgcgactgcatcgagccgatcatgctgccgctggccattgagctgctggccaagcaccgcgccgccggtgataagttggtgatcatcaccgccaccaaccgtttcgtcaccgcgccaattgccgcacgcctgggcgtggaaaccctgatcgccaccgagtgcgaaatggaaaacggccgctacaccgggcgcagcaccgatgtgccgtgcttccgtgaaggcaaggtgacgcgcttgaaccgctggctggaagaaaccgggtacagccttgaagacagctacttctatagcgactcgatgaacgacttgccgctgctggagaaagtgactcacccggtggcggtggatccggatccgaacctgcgggccgaggccgagaagcgcggctggccggtgatcacgctgcgcagctgatgaagccatcgggggcaagccccctcccacacttgatcgggttcacacggtcaaaatgtgggagggggcttgcccccgatgcagacgactcggtccaaagccttaaaccggcttggcgcccatcagaccggcaatcgccacaaaccccaccagactgaccaccgccagcaccagcgtgaagttcaggctaccgccctcgcctttgcccaggcgattgagccgcgccaccagccagaaccaggccagcgccgccacggtatagaggatgctggagcccaggatccaggtctggcccagcggccagcccaccaggtgcaccagccaccagccggtaaacggcatgctgaccacgcatacgcccatcagcaaccaaacaaaggcccacgggcgttgcacggtcgccgccgggccggcgctgcgtttgcgccaggccagcagcgccaggccaaggccactgagcagcaacaccacggtggctgccatgtggataactttcagggtggtcagggtttccatgtgtcgttttccttaaaggccgccccctcagcgtagtcgctcaaccgaggaacagtttgtaggccgggttatggctttcatcccagtacgggtagccgatggcttccagggcggccggtaccaggtgacgttcatccgccggcacttgcagcccggcgaccacacggccgtctgccgcaccgtggttgcgatagtggaacatcgagatgttccagcgcccgcccaatttgttaagaaagttgaacaaggcccccggacgctccggaaactcgaagcgcaacaccacttcatcgctaaccttggccgcatgcccgccgaccatatgacggatatgcaacttggccagttcgttctcggtcaggtccagcaccgggaaaccctggctggtcaggctggcgatcagggcactgcgcggatcgttttccgggtgggtctgcacgccgacaaagatgtgcgcctcgctgccggagtggtagcgatagttgaattcggtgatctggcgtttacccacggcctcgcagaacgccttgaagctgccgggcttctcggggatggtcacggcgatgatggcttcgcggccttcacccagctcggcgcgctcggccacatggcgcaggcggtcgaagttgacgttggcaccggagtcgatggcgaccagggtctgcccggtgacaccacgggtttcaacgtacttcttgatcccggccacgcccaaagcccctgccggctcggtgatggaacgggtgtcgtcgtagatgtccttgatcgccgcacagatctcgtcggtgctcacggtgatcacttcatccacatagtccttgcagatgtcgaaggtgtgctggccgatctgcgccactgccacgccatcggcaaagaggcccacagtcggcaacaccacgcgctcgccagcagccatggcggcttgcaggcagttggagtcgtccggctcgacgccgatgatcttgatctccgggcgcaggtatttcacgtacgccgcaatcccggcgatcagcccgccgccgcccaccggtacgaaaatcgcgtccagcggccctggatgctggcgcaggatctccatcgccacggtgccctgcccggcaatggtgtgcggatcatcgtaggggtggatgtagacgtagcctttttcgtcgaccagtttcagcgagtaggccagggcttccgggaaggaatcgccatgcagcactactttgccgccgcgggagcgcacgccttcgaccttgatttccggcgtggtcttgggcatcacgatggtggccttgacccccagcaccttcgccgccagggccaggccctgggcatggttaccggcagaagccgtgaccacgccgcgcgcacgttcttcggcgctcagttgggtcagcttgttgtaggcgccgcgaatcttgaacgagaacaccggctgcaagtcttcacgcttgagccagacctggttgcccagccgctcggagagctggcgggcggtctgcaacggggtttctacggcaacgtcgtaaacgcgcgaggtgaggatctttttgacgtactgttcaagcatcggcggatatcactgggcgggttgggcagggccaaggagtctaacccagcgtttgggcgggcgaccacacgaatccagaggttttgttgggttatactcgcgcccctcgataactccccgcccgttccggagcccgcatgacccaggatcaactcaaacaggcagtggcccaggccgctgtcgatttaatccttcctaaactcgacgacaagagcatcgtcggtgtcggcaccggctccaccgccaactgctttatcgatgcactggcccagcacaaaggcgcgttcgacggcgccgtggccagctccgaagccaccgccgcacgcctcaagggccacggcattccggtgtacgagctcaacaccgtgagcgacctggagttctacatcgacggcgccgatgaaagcgacgcgcacctgaacctgatcaagggcggcggcgcagccctgacccgcgagaagatcgtcgccgccgtggccaagaccttcatctgcatcgccgacgccagcaagctggtgcccgtactcggcgccttcccgctgccggtggaagtgatcccgatggcccgcagccacgtggcccgcgagctggtgaagctgggcggcgacccggtgtaccgcgaaggtgtgctgaccgacaacggcaacatcatccttgacgtgttcaacatgcagatcaccaatccggtggagcttgaaactcagatcaacgcgattgtcggcgtggtcaccaacggactgttcgcggcgcgtccggccgatgtgctgctgctgggcaccgccgaaggcgtcaagaccctcaaggcctgagaacaccgctgagctaaggtgggagggggcttgcccccgatgagggagtgtcagtcaacggatgcttggctgatacaccgctatcgggagcaagccccctcccacattggttcagcggggcttcttgaagacgtagaacaggttcggctcgctgacgaggtacaacgcgccctcgtcatccatggcgatgccttcggcctgcggcactcgcttcgtcaggccatggcgcccgttgagcagtgacagactgctcagcgggcgaccgtcgatatccagttccagcaccaggaacgactcatccgacagcgccagcagatggccgctgcgctcatcgtattgcaggctcgacaggtcacgcacaaacaacccggcgtcgcgcttggggttattgatcacgtgcaccgagtaggttttttccggtttgaaatgcgggaagccatgcacctcatagatcagcatcgggtcgcgctccttggccacgaacaggcgcttgcccaccgagtcgtaggccaggccttcaaagcccttgttgccaccgacatgcacacccagggtcatctgctccgcatcagcggcgtcgaggaattgggtatcgtcgtccacgtgcaccttgatcagccgctgctggcgctcatcgctgatgacatagatgttgtcgctgatgaactccacggcttcggcatcgccaaacccgatcaaggggatgcgtcgcaggatcttgccttccagggacaactcgatcagctcggcgtttttattggtgacggtgaacaggcttttgcgcaccgggtcgtaggttagggccgacacatcgtcgtcgagcccctcaatggcctgagcctcaagcgtgacgcggtagtccgccagcccgatggagcgttcgtccgctggctggcgccatacctgccaattgaaccaggtgcgttcaaacagacgaaaatgctgcgcaacggccccggcgctgaccagggtgatcagcgcaagcatgataaacaggggtttggggcgggctagtcgttgcatcgggcgggctcaaagtcaaaagtggcgaatgaatatcacgcccgtctgaatttaaacttaaacacgcccggatgtctggcagatgccgctcacagagacctatctgacgtaatcggtgtgctatttctgcttttcgaaccggtagaacagattgggctcactgacgatgtacagcgtgccctcctcgtccatggtcaccccttcggcacggggaatggtgtgcttgatgccgttgaaaccgccgagcaaggtcatgaagctgacttgctggcccttctcgtccagctccagcagcaggtgggagtcggccgacagcaccagcaaatgcccggtacgcgggtcaacagccagggccgagagattgcgcatgtccagttctttgctggccagcttttgtttatcgcccgccagggtcaagccgccgtcgcttttccaggtgaacaacgcgggcgggcgctcttcgccaaggatcaactgctggttgcgcttgtcccaggtgatggcttcgaaggccttattctggtccttggacgggccgaggtcatagctggtgaagtcggccttgttcagttgggtggtgctcgcatcgaccttgacgatggtcagggtgtgctgccgctcgtcgaccaccgccaacaggccattttccattaccgtcacgccttccgggttgtcccagccgttgagcggcatcttgcgcagcacatcgccttgcaggctcaactccgccaggaacgggtttttgcccatcacggaaaacagggttttggtctgtggattgtaggcaacgtccgacgcttcgtccttctccatccccggcaaaagcttgccatcgatgaccgcatggtagtcaggcagccatacgctctgctggcgttcggccggcgtctcaaagcgctccagcacccacagcacaccgcgatcgtcccagtgcagggcccaggccacgccatacaggatcacccctgtcagcaacagccaggaataccagcgcatggcaaaacgggaacgcggcttgggtgaagcggagggcagggacacggccattgggcgctttttccggaaagtcagcgttaggtgatagcacaggaacaacgggcctgcgcgcacgaggctgaggattatccggatggcgtgtgaaaaaaatgcaaaagcctgagatgtgggagggggcttgcccccgattgctgagtgtcaggcaacagatgtttgactgataaaccgctatcgggggcaagccccctcccacaatgttgaccgcgttttgtcagtgcttaacgaacaacgctttcaaagcgattctggcccgccagttccagcaccaactcatcccccacattcaacgggcctacaccggccggcgtgccggtgaggatcacgtcgcccgcctgcagcgagaagcagccggccatgtgctggatcatcgggatgatcgggttgagcatctgcgcgctgttgccgtcctggcgcacttcgccattgatgctcaggcggatgccgatgtcggtgacatcggcaaaggtgctgcccaccacgaacggtgcaatcaccgccgcgccgtcgaaggacttggcgatttcccacggcaggcccttggctttcagctcggcctgtttgtcacgcagggtcaggtccagggccggggcgaagccggagatagcgtccagcacttcttcacgactgggcttgttcgacaaaggcttgccgatcaacaccgcgatttccgcttcgtaatgcaccgaaccgcgttcggtcgggatgctgaaaccaccttccaacggcaccacacagctgcccggcttgatgaacagcaacggctcggtcggcgccgggttatccagttccttggcatgttcggcgtagttacgcccgatacacaccactttcccgaccggaaagtggatgttggtgccgtcgacatacttgtgctggtagctcatggaacgactccttcagggcggttaaacagcgaagatcttgccagggttcatgatcccgttcgggtcgaacaccgctttcactgccttcatgtattcgatttcaaccggcgagcggctgtaggtcaggtaatcgcgcttggtcatgcccacgccgtgttcggcggagatcgaaccgttgtacttcgcgacggtttcgaacacccacttgttcacggtggcgcacttggcgaagaactcgtccttgctcaggttttccggcttgaggatgttcaagtgcaggttgccgtcgccgatgtggccgaaccagacgatttcgaagtccgggtagtgttcgccgacgatcgcgtcaatttccttcaagaacgccggtactttggagacagtcaccgagatatcgttcttgtatggggtccagtgggaaatggtctctgagatgtactcgcgcagtttccacaggttgtgcagctgggtttcgctctggctcatcacgccgtccagcacccagccctgctccacgcaatgctcgaaggtttccagcgcgtggttggcgacttcttcggtggtggcttcaaattccagcagcgcatagaacgggcagtcggtttcgaacggcgccggcacatcgccacggcccatgaccttggccagggccttgtcggagaagaattcgaaggcggtcaggtccagtttgctctggaacgcgtgcaagaccggcatgatcgagtcgaagtcagtcgtaccgagcaccatggcggtgaggttcttcggcgcacggtccaggcgcatggtggcttcgaccacaaagcccagggtgccttcggcgccgatgaacagctggcgcatgtcgtagccggtggcgttcttgatcaggtcgcggttcagctccagtacgtcacccttgccagtgacgacctttatgccggccacccagttacgggtcatgccgtagcgaatcaccttgatcccgccggcattggtgccgatattgccgccaatctggctggaccccgacgaagcgaagtccaccgggtagtacaggcctttttcttcggcgacgttctgcaattgcttggtgaccacacccggctggcacacggcggtgcggtcggtgaggttcacgtcgaggatctggttcatatagtcgaacgacaccaccacttcgccgttggccgccacggcagcggccgacaggccagtacgcccaccggatggcaccagcgcgaccttgtgggtattggcccaacgcacgatggcctggacctgctcagtggtcttggggaagacgatggcggtcggcgcgggtgcgaagtgcttggtccaatccttgccgtaagcctccagggagtctgcatcggtcagcactttgccgggctcaaccagggtctttagctcatcaatcagggcaggatgggtcatcgacagaactctcgaacaattcatggtcatcctgagaacgcttcacgtcgcaggaatgagtgtttagcggggcgcgtatgctagcataccgcccccgcaggacagagcccaagggcgtttctgcggtgacggctttcctgccgtccgggtcagcttaagcgatccgattccctgccatttttctccgggatacaggtttacgcagatgagcaagacttctctcgataagagcaagatcaagttccttcttctggaaggcgtccacccatcggccgtcgaagttctgaaggccgccgggtactccagcattgagtacatcaccagttctctgccggaagcccagctcaaggaaaagatcgccgacgcgcactttatcggcattcgctcccgcactcagctgaccgaagaaatcttcgatcacgccaagaaactcgtggcggtcggctgtttctgcatcggcaccaaccaggtcgacctctctgctgcgcgcgagcgtggcatcgcggtgttcaacgcaccgtactccaacacccgttccgtagcggagctggtgctggccgaggccatcctgttgttgcgcggcattcccgagaagaacgcttcctgccaccgtggcggctggatcaagagcgcggccaactccttcgagatccgtggcaagaagctgggcatcatcggctacggctcgatcggtacccagttgtcggtcctggctgaaggcctgggcatgcaggtgttcttctacgacaccctgaccaagctgccattgggcaacgccacccaagtggccagcctgaccgagctgctgggcatgtccgatatcgtgaccctgcacgttccggaaaccgctgagacccagtggatgatgggcgagaaggaaatccgcgccatcaagaagggcggcatcctgatcaacgcggcacgcggtactgtggtcgaactggacgccctggccgacgcgatcaaggacaagcacctgatcggcgccgccatcgacgtgttcccggttgagcctcgctccaacgacgacatcttcgaaagtccgctgcgtggcctggacaacgtgatcctgaccccgcacatcggtggttccaccgctgaagcccaagccaacattggcctggaagtggccgagaagctggtcaagtacagcgacaacggtacctcggtatcgtcggtgaacttcccggaagtggccctgccggctcaccctggcaagcaccgtctgctgcacatccaccagaacatccctggcgtgatgatggagatcaacaaggtcttcgcggaaaacggcatcaacatctccggtcagttcctgcagaccaacgagaaggtcggctacgtggtgatcgacgtcgacgccgagtactcggacctggcgcaagagaagctgcagcacatcaacggcactatccgtagccgcgtgttgttctaaggtttcaaccgcaccacgaaaaagggagcccctcggggctcccttttttgcatctgaacaaatcttacttgacgttaaccgtgatcactttcgaggctacagtgggctcgaactggcggtgcacgttatcgcccgctaccagctgcaaggtgtgtttgcctggggtcaatgtcagctcggtttcggtttgcgccttgccgaaatgaatcgaggtggcagtggccgggatagcctcgtctgctttgagcgacgtcacgtcctggtcgaccagcaggtgatggtgaccggcaccgggcacctgcttgtcgatcggttccaggtccagacccttcatgccaaatttgacggtgaaggtcttgtcgacggtcgcgccatctttgggcgatacgataaacacctcggcgcctttgggggcgggggtgcgcggaacatcagcagcattcgccaacatcgaagcacccagcatcagggaggccagggtggcacgggacaaaagggctttcattcgcttctccagtttttctgtgaaatctgtagggttatgacaacttcgcgacaaattgctgtccaaggcactcaacaccatagcaaagcgatgctgaccggcgcctcgcacataaaaattctctaggagtgaccatgcgcttttcgcctggcctgttactgctgcttccccttctgagccccctggctcacgccgaactggtcgatgatgtgttcgatcgtggcgaactgcgcatcgcccttgaagccaatacgccaccgttcaacttcaaggacggcgacaaactcaccggttttgaagtggaactgggtgaactgctggccaaggaaatggacgtgcgctcctcgttcatcaccaccgatgacgccgacttgctgccaggggtggcaaccggcaagtacgacgtggccatcaaccatatcgctaagactgccgaccttgaggatcagttcgatttcagtgaggcttatcgcgagaagcccgatttggtgatcccgttccaaaagggtaacccggcgttcaagacgagcctggacggcgcgctgaagcgggtgaaggaggatggccggttaaaggcgctgtcgcagaagtggtttgacgcagaagccccgactacaactgcgccagtgcctgcgcagcctcaggtaactccaactcactgaacacctgcacgccgtggcgcttgagcagcgccgcggttacgccctcgccactcactttcacgccggtaaaggtaccgtcataggtgagcaggttgccgcaggatgggctattggccttgagcacggcgatgcggatagcgtggcgttcaaccagcgccagtgcctggcgggcgccatcaaggaacgctgcgctgaaatcttcgccctcagccgtcagcacctgggcacgcccctcccacacatccacgccctgcccgcctgggatctcggcagcaggtcgtggcgttggcaaaccacccgacacttccgggcagatcgcaaccacacgcccttcggcctgccacgccgccaattggtcgaacggcccgctggccccgccgtcgtaacgcaccttgtgcccgagcagacagcggctgatcagaatcttttgcatgtttaaaacggctcgttgccccgccggcgaaaccagccggtgagggacaggcgttcgcgcgtagcgggcatcacttcgtggggcacctcgcccgacaggaacaccaccaggcaaccgccggtgggcaccacatcgtattcgacgccgtccttgaggtacatgcgcaactggccgccatgttcgggcagccaggcgtcattcaagtagatcaccgccgagaccatgcgccggtcatcgtcgcggaaacggtccaggtgcttgaggtaaaaagcccccggcgggtacatcgcgaagtggctctcaaagtcttccaggcccaggaacaggccacggttcatggcgaggcgcaggctgtccatcaccgccatgtaagtgtcgcaaaccgccgcatcgccctcttccagccactggatgtggtcaccgcgaatgccttctcgaatctcctgggtcggcccccgccctaccgctgccggggccagttcaccttcggccttgcgtttacggcactcagccgccagttccagggtcagagcctggggcaggaagccgtcctgtcgcgaccagcccttttcggccaggtcgtcgacaatacgttgcagcaaggggtgatcgaggggtatttgcatggcgcgcatagtatccatacgcctgtgaatccgacagagccgccgagcgtctgaatgcactttagtcaggtgactgataggacttctcgacaaatcctacgcccgacacggacaatagtggccgactgacaggagtccctatgcgtcgtttgtttttttccttgctgatgttctgcgttttgcccgcctgggcagacggccatgaccagttgtacaaggtcgccggctgggccgaacaacgtgcgcatttcaatgacgccctcagtgccgcccagcaacgctaccgcaatagcctgccgccagcggtgtaccaggcgctggtggacaacagcaataaacgcttcgccgcccaggcggtggaccagcgtgccgaagcgcaattgcgcaagcacctggcggaccctgcgcctgccttggcgtttttccaatcacccctgggccgcaagattgtcgccgccgaattgctcgccacccgccgcgaccaactggcgaaaaatgcccagggcctgccgaaaatcgaggccgacgccacccgcagcctgatcatcggccacctggcccaggccctgccggcccgcgaagccggcgcggaagtcagcctggcgattgccggcgtggcggccgacagcctgagccagatgatccccggcctgctgggcggcggccaggcccagggtatgttgaatggccaacgcgagcggttgatgcagcagatcgacaaggacctgaacaacacgctgctgtacgtttatcgggatctgtccgacccggagctggaagaattcgcgacgtttgcggagtcgccggagggcaaggcgtattaccaggcggcacttgccgctattcgcgccgggctggcggtcgggcaaagcacttccagccttacgcagtaaaaagtgtgggagggggcaagccacctcccacatttggatcgcgttagttcaggtgacgggtgagatagctgaagtactgctcacgaatctccggaatctcattggccagatgatgcctgccacgcggcagcatcaacacctcgggctggtcgaacttgctgcgcaacacctgcaggttgtgctgccaatccacggtcatatcctcttcaccctgcacaatcaccggtcgccgagggctgcgcggtgcggcttcgatgcgtttgatccagcgcgccaatgcacccacccaggcggtcggcaattgccgcggctgcagcgggtcgacttcaaggaacggtttgaacgcggggtcgtgggtgttttcgctgaaccgccgcgcaatgcctttgacgaatgggcgcagcaggtaataactgacctgcgaccaaccccaggcacgcggccgcaccaacggtgacagcaggaaggtcttgccctgggccgggctgtcggcgccgtggttgagcaggtggtccaccaccaccgcgccgccggtgctttgcccgaacaggtgccagggttgcggcaactgcaatgcttcggcctgggtaaacagcgcccgcaccacgtgctggtacaccgcgaaatcatcgatgctggcgcgtgcgccgctggacagcccatgcccgggcagatcgcaggcgatcaccacaaaaccctggtccagcgcccacttcaccacatggcggtacaaccccatgtggtcgtagaagccgtggaacatgaacatcgtcgctacaggcctgggcggccaccacacctgcgcgaccacctcgaaaccgtccacctcgaagcgccccaggcggctctcggcctggtccagcccgtagaaacgctggtagacccgtgcctcggctgaaagcggttgcgcatccaccaggggccgcaagctttcgcgcagatgatcggggtcaaaggtaacgggcataaaggcttccagactggcggcgaagatgaatatcgagctgcgatattcatctgtcaggacaagcatggcaagctacgcgaccttcgaggatacatctgaatgcgaccgccctaccgcaccgccctattcgccagcctgatcctggttatctgcgtcggcgtgctgtgggcggcgtatgactggttccagggccgctacctgcgcgccttcagcgaacacacggcggtgttttccggcgacccattgaagctgcccgccgacctcgccggccccggcccgatccgcctggtgcacttctgggacccggcctgcccgtgcaacgtcggcaaccagcagcacctgggcgagctgatcgagcaatacgcgccccaaggcgtcgagttctacgccctgcaaaagcccggcagccacggccaactgcccgacaacctgcgcacgatgaaaaccctcaccaccctgcccggcgccgaccaggtgccggccagcccggccgtggggatctgggatcgcacaggcaagctcgcgtatttcgggccctacagcgagggcctcacatgcaactccagcaacagcttcattgagccgatcctcaaggccctagacgcgggacgccagataaatgctactcacaccctggcagtgggctgctattgttcgtggccaaaaggctcgtaacccgcctctctcttggtaaggaatattcatgaagcgcgtcttgcaggtgttcgcggttctggtcgtgctggctgcccttggcgcaggcgcgtacgtctatagcaaacagcccacccgccagggcacggtgacgctggccaacctgcaaggctccgtcacggtgcgctatgacgaccgtggcgtgccgcatatccgcgccgagaacgaaaacgacctgtatcgcgccctcggctatgtgcatgcccaggaccgtctattccagatggagatcatgcggcgcctggcgcgtggtgaactggccgaggtgctgggccccaaagtgctggagaccgacaagctgttccgcagcctgcgcattcgcgaccgcgccgcgacctatgtggcgcaactggatcatgagtcggcgcactggaaggccctgcaggcctatctggacgggatcaaccagtatcaggacagccacgcccgcccgatggagttcgacgtgctgggcatccccaagcgaccgttcaccgctgaagacaccatcagtgttgccgggtacatggcctacagctttgccgccgcgtttcgtaccgagccgttgctgacttacgtacgcgaccaattgggcagcgactacctgaaagtcttcgacctcgactggcaacccaagggtgcgctcaacctcgccgccagcgattggcagaccctcggcgccctcgcctcactgagcgaacaggccctggccgacaacggcctgccgcagttcgaaggcagcaacgcctgggccatcagcggcaaccgcaccaagagcggcaagccgttgctggcgggtgacccgcatattcgtttctcggtgccatcggtgtggtacgaagcgcagctgtcggcaccgggttttgagctgtatggctatcacaacgctctggtgccgatggcgttcctgggacacaacctggacttcggctggagcctgaccatgttccagaacgatgacctcgacctgatcgccgagagggtcaacccggacaatcccaaccaggtctggtaccacggccagtgggtcgacatgacccgcaccgagcaacagatcgcggtgaagggccaggcgccagtgacgttgaccctgcgccaatcgccccacggcccgatcatcaatgacgtgctcggcgagaacgccggcaacacaccgattgctatgtggtgggcgttcctcgatacccagaacccgatcctcgaaggcttctaccaactcaaccgcgccgacaccctggccaaggcgcgagccgctgcagccaaggtctccgcgccgggcctgaatatcgtgtgggccaacgccaagggtgatatcggctggtgggcggcggcgcaattgccgatccgcccggccggagccaaccccggtttcatcctcgatggcagtaccgaacaagccgataaactgggcttctaccccttcaccgccaacccccaggaagagaacccggtgcgcggctatgtggtgtcggccaatgctcagcccgtgtcacccaccggcatggaaatccccggctattacaacctggccgaccgtggccagcagttgaatgcgcagttgagcgacaagagcgtgaagtgggacgtgaacaacagccaggccttgcagctgggcaccaccaccgctttcggcccgcgcctgctggcgccgctgctgccggtactgcgtgaggtggtcaaggacccggcgcagctgaaactggtggagcagcttgccagctggaagggtgactacccgctggactccaccagcgccacgctgttcaaccagttcctgttcaacctggccgacgcggccttccacccgaaactcggcgacggcatgttcaagaccctgctcaccacccgtgtgatcgacgccgcgctgccacgcctggccgccatgccggattcgccgtggtgggacggcaagcgcgctgacaccgtcaagctcgcctgggacaacagcctcgcgcacctcaaggccacccttggcgatgacccgagccaatggcagtggggcaccgcgcataccctcacccacggtcatccgttgggcatgcagaagcctttggacaaggtgttcaacgtcggcccgttccctgccccgggcacccatgaagtgccgaacaaccagtcggccatgatcggcccggcaccgtggccggtcacctacggcccctcgacccgtcgcctgatcgatttcgccgacgtggcccacgcgctgaccatcaacccggtcgggcaaagtggcgtgccgtttgaccgccactacagcgaccaggccgaaacctacatcgaaggtggctacgagcaggcgcacttcactgacgaggaagtcaccgccaacacccgtggcaccctcaagttgctacccgcccgatgaacgcaaacgccccggcgcctcgccataggtttccttgaatttcttgctgaacgccgcctgggactggtaacccacctgggcggcgatatccagcaggctcaggtgtgactggcgcagcaggttgaacgccagctccatgcgcaattgggtcagcagcacccacggcgatacgcccgcgactttcacaaaggcgcgcatgaaggtggcgcgtgacatcgtcgcagcggccgccaggctgtcgatggtccactcataccctggatcggccagcatggcttgccaggccttgctcaggcgcttgtcggtaagcaaggcgaaggtgccggcgaccggtgcctgacgggcgagccaggcgcgcaggatcagggtgaacagcgccgatgacaatgcatcgataaacgagcgggcgccgagttgctggccgtccgcttcgctgcgcaataacgcgatcaacgccgccagttgcccgtcgccgtgccactcgcggctggacacaaccaggtattccggcaacgcgccgagcagcagcgactggcggttgtagtgaaagctgccgcagagcatgtccaggtccggctggtcaccgcccaggcggtgcacggtgagcacaccgccttcgatgaccttgggttgcatcggccggatccgcgcgccctggctgcgcagcaaatgcgtggcaccgccgggcatcagcaaaatatcgccgtgctccagggtcacttgctgcccacccgacaactcggcgcggcaggtgccactgagcacgatgtgatagggcgccatacccaggctttccggcgcatggtccaaggcccagtcgccctggaactggcagcgcagatccagactgccgcgcaggttggccagcgcgataagcgtgtcgatcgaattcatttgcgagcatcggtcaaaaacatgagcggattgaacaataacgccgcccccgaacggaagacactggctccacaccaccctacccgttcaggagttaccgcaatgttcaataactggtccgacttgctgcctaccgtgaagaaagcctttggcgcgctgggcaagagcaacccgaagatggtcaaagcctacatggcgctgggcgaagctgccgaggaaaacaacgtcctcgatgccaagacccgtgaactgatttccatcgccgtggccattaccacccgctgcgacggttgcatcggcgtgcatgccgatgcggcaatcagggccggcgccacccgcgaagaagtcgctgccacgctggccactgcgatctcgctgaatgccggcgcggcgtacatctactcgctgcgcgcgctggaagcctacgacacgctcaaaccggcgccgcaaagttaagccggaactgttgcggcgtcacgcccagccgacggttgaacacactgcgcatgtgctgggcgtcacgaaatccgcattgataggccacggtcttcagcggtgcggggctgctttcaagcatcacccgcgccgcgtccacccgcgcgcgctcgacaaactccgccggcgtgatgcgcgcctcgcgggcaaacacccgggagaaattgcgcgcactcatgttcgcggccttggccaggtcggcaatggtcaggtccccggtcaggttcgccaacacgtacaactgcaccagcgccaccgccgaggtggtttcggcgtggggcgtcagaaacgggctgaactgcgactgcccgcccgaccgctgggtgaacaccaccaggcgcttggccacgctcaacgcgacttccgggccatggtcctgggccagcagatacaacgacagatcgatgcccgccgtgaccccggccgaggtgtagagattgccatcctgtacgtagaggcgatcggcttcgacctgggccgtggggcacaggcgcgccagatccgccgcatcgttccagtgggtggtgacggttttcccgtccagcagcccggcgcgggccagcatgaaggcgccgttgcagatggagccgaagcgctgcgcacgcgccgtggcaccacgcagccaagcatcgaactcggcgccgaagtcttcgaagggtaactgcggaccacccgccaccagcagcaggtcatagggctcaagggcatcgctgtagtgccggtgggcctgcagcgacagaccgttggaagcggccatgttgccgtgaccgaagccgatgacttccaactggtaatgatcctgcggcggcagaaaacggttggcttcgcagaacacgtccatgggaccggtcacgtccagtgactggacgccggggaagatcaggatggcgacggttttgctcatgagcaggcacaccttctctaactggataaacacagaacccctgtgggagctggcttgcctgcgatgcagacgcctcgatcattcaggtataccgagtcgatgctatcgcaggcaagccagctcccacatttgaccgaatacacctttggcacgatgtacaaccacattggccgggattgctccctcgccgcaatggccccttcgctggcacaagaccagactggaatctttccagaggagaacgaccatgagcaccaccatcgccggcatccagatcccggacagcgccctggccaaggccaccaccgaatacatccgcgacgtcgaatccgacctgctctaccaccactcgcgccgagtgttcctgttcggcgccttgagcggtgaacgcaagcaactggcctacaacccggagctgctttacgtcggcgcgatgttccatgacttgggcctggtggagggccatcgcagtgacaacgagcgcttcgaagtcgacggcgccaacgccgcagccgcgttcctcaagccgtacgggctgagcgatgacgatatcgaacaggtgtggctgtccatcgccctgcacaccacgccgggcgtgccgcagcatttgcgcccgaccgtggcactggtgacggccggtgtggaaatggacgtgctgggcatggactatgccgcgttttccagcgtgcagcgcgaagccgtggtgcatgcgcatccacgcggtgaagggttcaaggagtgcatcatctgcgcgtttgccgacggcttgcgccatcgtccgcagaccacgtttggcaacgtgaagacggatgtgctggtggatcaggagccggggttcaagccgatgaattttgttgaagtgatccgcaagtcgccgtgggtcgcatagttgacttgaaatgcaatcaaatgtgggagggggcttgcccccgatagcggagcatcagccacatatccattggctgacacactgtcatcgggggcaagccccctcccacatttagaccggtgcagccgcccggcgcttgtccggctgctgccagccatccgccgcggcttcttcgatggcttgctgaatggccttcttgcgcatctcttcggcacgccggctgaagaaccacaccaggaaggtcaccagcgacaccgccagcaggatcaggctggccacggcgttgatctcgggtttgaccccaaggcgcaccgccgagaacacttccatcggcagggtcgtcgaacccggccccgacacgaagctggccagtaccaggtcatccagggacagcgcgaacgacatcatgccgcccgccgccaacgacggcgcgatcatcgggatggtgatcaggaagaacaccttccacggtcgcgcacccaggtccattgccgcttcttcgatcgacaggtccaattcacgcaagcgcgccgacaccaccaccgccacatacgccgcacagaacgtggtgtgggcgatccagatggtgacgatgccacgttcctggggccagccgatcatctgcgccatggccacgaacagcagcaacagcgacagaccggtgatcacttccggcatcaccaatggcgcggtcaccaggccgccgaacagcgtgcggcctttgaactggctgatgcgcgtcagcacgaaggccgccaacgtacccagcgccaccgccgccaccgccgtgtagcaggcgatttccagggaacgtgccaccgagcccatcaactgagtgttgtccaaaaggcccacgtaccacttgatcgaccaaccgccccacactgtcaccagtttggattcgttgaacgagtagatcaccaggatcagcatcggcaggtagataaacaacaaccccgccaccagcatgaaactcgagaaactgaagcgcttcatatcttgccctccatctctttggcttggctgcggttgaacaggatgatgggcacgatcaggatcgccagcatcaccaccgccagggcagaggccaccggccagtcacggttgttgaagaactcttgccacaacactttaccgatcatcagggtttccgggccgccgagcagttccgggatcacgaactcgcccaccactgggatgaacaccagcatgcagccggcgatgatgccgttcttggacagcggcacggtgatcttccagaagctgttgaaggtgctcgaacccaggtcggatgcggcttccagcaggctctggtcgtgtttcaccaggttggcgtacaacggcaggatcatgaacggcaggtacgaatagaccacgccgatatacaccgcaatgttggtattgaggatctgcagcggctcgttgatcaagccgatggacatcaggaagccattgagcaggccgttgttgctgaggatgcccatccacgcatacacgcggatcaggatcgcggtccaggtcggcatcatgatcagcagcaccagcacggtctgcatctctttgcgcgcgctggcaatggcgtaggccatcgggtagccgatcaacaggcacagcaacgtgctgaagaacgccattttcagcgagcccaggtacgcagcgatgtacaactcgtcgtcgccgagcatcgcgtagttgcccaggttgagcaccaattgcagtttctgctcaacgaaggtgtagatctcggtgtacggcgggatcgccacgtcggcttcggcaaagctgatcttcaggacgatgaagaacggcagcatgaagaacaggaacagccacaggaagggaatgccaatgaccgcatgacggccactgggcgttattcgttgcaggcggcgcttgagcttcttcatgttcatgagcgcagtaccacgccgctgtcgtcttcccaccacacgtacacctggtcaccccaggtcggccgctggccgcgacgttcggcgttggccacgaaggactgcaccagcttgccgctcggcagctccacgtagaacaccgagtggccgcccaggtaggcaatgtcgtgcaccttgccgctggaccagttgtgctcgcaggtcggcatttcggtggtgaccagcagtttttccgggcggatcgcgtaggtcaccgacttgtcttccaccgaggtggcgatgccgtagcccacatagatgtcgcggtccaggtcggcgcacttgagcaccgcgtggccttcggcatcgtctaccacctgggtatcgaagatgttgacgttgccgatgaactcgcacaccaggcggctggtgggcgtctcgtagatgtcgatcgggctgccgatctgggcgatccagcccaggtgcatgatcgcgatgcgttcggccatggtcatggcctcttcctggtcgtgggtcaccattacgcaggtcacacccacgcgctcgatgatctccaccaactccagttgcatctgcgaacgcagcttcttgtcgagggcgcccatgggctcatcgagcagcagcagtttcggacgcttggccagggaacgggccagggccacacgctgacgctggccgccggacaactggtgcggcttgcgcttggcgtactggctcatttgcaccagcttgagcatctcggccacacgggcgtcgatctcggccttggggatcttgtcctgttgcaggccgaacgcgatgttctgcgccacggtcatgtgtgggaacaaggcgtaggactggaacatcatgttgatcggccgctcgtagggcggcatgtcggtgatgtcttcgccatcgaggtagatgcgaccctcggtcgggcgctcgaaacctgcgagcatgcgcagcaaggtggacttgcccgaacccgaaccgccgagcagggcgaagatctcgcccttcttgatttccagggacacatcgtccacggcaatcgtctcgtcgaacttcttcgtgacccggtcgattttgaccagcaccttcttcggtgtctggtccccttcgagggctttcttataggcgccggaggcaactgccatttacgaaactcccagaaaaaaaagagtgcagcggacccaatgcgggcctgccttggatagtttgagccttacttgcccgtcttgaccttggtccagctacgggtcatcaagcgttgcactttcgggggtagctcgaagttgacgaaggtcctgtcgagtaccgcctgcggtgggtaaaccgcttcgtccgtgcgtatcgattgcttcatcagtttgtccgcccctgggttagggttggcgtaaccgacgtaatcactgacctgggcgatcacctcaggttgcagcaaatagttgatgaaggcgtgggcctctttgacgttggtggcatccttggggatggccagcacgtcgaaccacaggttgccgccttccttcggaatcgcgtaggcgatgttcacgcccttgcccgcttcgcttgcgcgagccttggcctggaacacatcgccggagaacccggcggccacacagatgttgccgttggccaggtccgatatgtacttggaagaatggaagtaggtcacgtagggccgcactttgagcagcttggcttcggccttcttgtagtcttccgggttctcgctgttggggttcaggcccatgtagttgagcactgccggcagcatttcatccgccgagtccatgaacgacacgccgcaggtcgccagcttcttcatgttctcaggctcgaacagcacggcccaggagtcgatatggtcgatgcccagcacttccttcactttatcgacgttgtagccaatgccgttggtgccccacaggtacggcacggcgtactggttgcccgggtcgttcttttccaggcgcttgagcagcgccgggtcgaggttggcgtaattcgtcagcagtgacttgtcgagtttctggaatgccccggccttgatctgcttgcccaggaagtggttggacggcaccaccacgtcgtagccggtacgcccggccagcagcttgccttccagggtttcgttggagtcaaacacgtcatacacgggcttgatgccgctggccttttcgaagttggccagggtgtcggcgccgatgtaatccgaccagttataaatatgcacagtcggtgcggcctgcacgctcaacgtcagcgtgatacctgcacccaccagcaaggctttgcgaaataaagaaattggcaagtggaggtcctcttaaatagttgggccttaaagttgttgcccggcaacaaaaccggcgcgcaacttaccctcgataaaccgatccggcaaaactttctgtcatttaatttgtgagaggggcagtcaaactgcccctccacaggtttcagggcttatttgcccgatttgatcttggtccagctgcgtgtcatttcacgctgggttgcagccggcaggtcggcaatcgcgtagagcttggcctgcacatccgctggcgggtagatgcccgggtcgctggtgatgtctttgtcgaccagtgcggtggccttctcgttaccgttcgggaagcgcacgctatcggtgatcttggccatgacttccggcttgagcaggtagttcatgaacttgtaggccgcgtcgacgttttcggcatccttagggatggcgaccatgtcgaagaagctgccagcgccttctttcggaatgtcgtaggccaccttgaccttgccaccggcttcagccgcacgggacttggcctgctggatgtcacccgagtaccccacggccacgcagatgttgccgttggccaggtcggagatgtacttggacgagtggaagtagccgatcgaaggacggatcttcaggaacagcgcttcggcctgcttgaggtcgtctttcttctggctgtcggtcggcaggcccaggtagtgcagcgcgatcggcagcatttcggttggcgaatcgaggaagctcacgccgcagcttttcagcttggcgatgttctcaggcttgagcagcacgtcccacgaatcgatcttgtccacgcccagcgcggccttgaccttctccgggttgtagccgatgccgatcgaaccccacatgtacgggaaggcgtgcttgttgtccgggtcgctgaccgacacggctttaagcagggatttgttcaggttgtcgtagttggacagcttggacttgtccagctcttggtagacaccagccttgatctgcttggcgaggaagttgttcgacggtacgacgatgtcgtaaccggacttgcctgccagcaacttggcttccagggtttcgttgctgtcaaaaacgtcgtacaccaccttgatgcccgactctttttcaaagttggcgatggtgtccggtgcaatgtagtcggaccagttgtacacgtgcagcactttatcgtcggcctgggccgcgcccgccattgcgcccatcagggacaaggcgaggagggtcttgccagcgttcttcaaacctaatgccttcatttggtgatgctccaattttttcttttttgggccacaagctttttatgttgagtagcccagccaaagggcaacaaaacagggcgacagtctggcaagttccgaggccggctttcaaccaaagcctcatttataactgcccaggacgcagcgcccgaaagccgctgcgttctgagcctagcacttagccctgcaatgccgccaaagtcaggtccaggcactggcgagccttggtcaccagctcgtcgatttctgccttgctgatcaccagcggcggcgaaatgatcatggtgtcgcccacggcgcgcatgatcaggccattttcgaagcagaacgtacggcagatcatcccgacgcccttgccttcgtagcgtttgcgggtggccttgtcctgcaccagttcaatggcaccgagcatgcccacgccgcgcacttcgcccaccagcggatgctccgccaattccctcagacgtttctgcaaatacggtgccgtttcgtcgtgcacacgcttaacaatttgctcatcgcgcatgatgcggatgttttccagggccactgcagcggccaccgggtgaccggagtaggtgaagccgtggttgaaatcaccgccttcgttgaggaccgccaccacgtcatcgcgcacgatcaggccacccatggggatgtaacccgaggtcaggcccttggcgatggtcatcatgtgcggcttgaggtcgtagaaatcgctaccgaaccactcaccggtacggccgaaaccgcagatcacctcatcggcaataaacaggatgtcgtacttggcgaggatttccttgatgcgcggccagtaggtgtctggcggcacgatcacgccaccggcaccctggatcggctccgcaataaacgcacctacgttgtccacgcccagctccaggatcttttcttccagctggttggcggcccacacgccgaattcttccgggctcatgtcgccgccttcgccaaaccagtacggctgggcgatgtgggtgatgcccgggatcggcaagtcgccctgttcatgcatataggtcatgccgcccaggctggcgccggccaccgtggagccgtggtagccattcttgcggctgatgatggttttcttgttcggctggcccttgatcgcccagtagtggcggaccatgcgcaacatggtgtcgttgccttcggaaccggaaccggtgaagaacacgtggttcatgccggcaggtgcgatgtcggaaatggccttggccagttccagcaccggcgggtgtgcggtctggaagaacaggttgtagtacggcagttctttcatttgcttggcggcggcgtcagccagttcatcgcgaccataaccgatcgccacgcaccacaggccggccataccgtcgaggatcttgttgccttcgctgtcccacagataaacgccgtgggctttggtgatgatgcgcgggcctttctctttcaattgcttgaagtcgctgaacggcgccaggtggtgatcactgctcaaggcttgccattcacgggtttgcgggttgttgctggacataccaatctcctagacttttcaggtgagggcgcgctgttcccacagcgcgcccggcgcatcagacggcaaagagcaggaattcccgctcccacgaactgatcacgcgcttgaagttttcatgctcggcccgcttgaccgcgacgtagcctgtgatgaatttctgacccaggtatttctcgatggtcttgctgttttccatgcgctccagggcgtcttcgatggtcaacggcaggcgcaggttgcgccgctcgtaaccacggcccaccaccggcgcgctcggattatggccttcgaccatgccgatgtagccgcacaacaggctggcggcaatcgccaggtacgggttggcgtcggcgcccggcaggcggttttccacacggcggttctgcgggccggcatccggtacgcgcaggccgacggtgcggttttcttcgccccattccacgttcaccggcgccgaggtgtcgggcaggaagcggcggaatgagttcacgttgggagcaaacagtggcagcagttcagggatgaacttctgcaggccgccaatgtggttgaggaacagctggctcatggtcccgtcttcattggagaagacgttcttgccggtggcgatgtcgatgatgctctgatgcaggtgcatcgcgctgccgggctcgccggtcatcggcttggccatgaaggtggcggccacgtcgtgcttgagcgcggcttcgcgcatggtgcgcttgaacaccaggatctggtcggccagggacagggcatcgccgtgacggaagttgatttccatctgggccgtgccgtcttcgtggatcagggtgtcgaggtccagctcctgcagttcgcaccagtcgtaaacgtcttcgaacagcgggtcgaattcgttggcggcttctatagagaaggactggcgaccggtttccgggcggccggaacggccaatcggcggttgcagcgggaagtccgggtcttcgcagcgtttggtcaggtagaactccatctccggcgccacgatgggctgccagcctttgtcagcgtagagcttgaggactttcttgagcacgttgcgcggcgacagctcgatggggttgccttgcttgtcgtaggtgtcgtgaatcacctgggcggtcggctcgatggcccatggcaccaggaacacggcgttctggtcggggcggcagatcatgtcgatgtcggccgggtcgagcaattcataatagatgtcgtcttcgacatagtcgccggtcacggtctgcagcagaacgctttcgggcaggcgcatgcccttttcggcaatgaacttgttggtcggcgagatcttgccccgggtgataccggtgaggtcgccaatcatgcattcgacttctgtgatcttgtggtctttcaaccaatcggtgagctggtcgaggttgttactcataaatgcctctgggctgggtttcctggcatccattaaaggccaggcgttgtttgacgcagcatccgcgtcgttttttcgttcagggtaggagcttacctgccatttgctgctgcgttgcattcctcacgccaaagttgtgcgcaatcttgagcagcatgctgggcgcacgctgttcggtggcagatgaagaggcaaagaagaggtcggcccgggcgtcaagaatattggccggggagcgcgctatcacgcgggaggaatgtacggatgacacagccttgctgaagcaggccaagacgccgttgggcggcaggtgaaacatgaagcaccccggtattattgctgttatgggtttgaatcgagcttagccttgttcatttttttacacaacacccccgtaaaaaatacaacacggcccgctcaagcctgcgagtcctaagccgttcaaacccaaaaaaccgccccaaaaggccccaaaaaagccttcgtggcgcttttttagggcaaaaaaggcctcgcttgacttcggcatgccgttcgggttgactgaaaccagaaaagatcaatgattgatatttttaacaacaaaggtgttgcatcatgtcggtacccccgcgtgccgttcagcttaacgaagcgaacgcgttccttaaggatcatcctgaggttctgtacgtagaccttctaattgcggatatgaatggtgtggtgcgcggcaagcgcatcgaacgcaccagcctccacaaggtttacgagaagggcattaacctgcctgcctctttatttgccctggatatcaacggctctacggtggaaagcaccggcctgggcctggacatcggtgatgctgaccgaatctgttatccgatccccgacaccctgtgcaatgaaccctggcaaaagcgccctaccgcgcaattgctgatgaccatgcacgaacttgaaggtgaacctttcttcgccgatccgcgcgaagtgctccgccaagttgtaagcaaatttgacgacctcggtctgaccatctgcgccgccttcgagcttgagttctacctgatcgaccaggagaacgtgaacggccgcccacaaccgccccgctcgccgatctccggcaaacgcccgcactcgacacaggtctacctgatcgacgacctcgacgaatacgtcgactgcctccaggacatcctggaaggtgcgaaagagcaaggcatcccggccgacgccatcgtcaaggaaagtgccccggcgcagttcgaagtgaacctgcaccacgtggccgacccgatcaaggcctgcgactacgcggtactgctcaagcgcctgatcaagaacatcgcctacgaccatgagatggacaccaccttcatggccaagccttacccaggccaggcaggcaacggtttgcacgtacacatctcgatcctggacaaagacggcaagaacatttttgccagcgaggatcccgagcagaacgccgcattgcgtcacgcgatcggcggtgtgctcgagaccctgcccgcccagatggcgttcctgtgccccaacgtcaactcctaccgtcgtttcggcgcacagttctacgtgccgaactcgccgtgctggggcctggacaaccgcaccgtggcgattcgcgtaccgaccggctcgtccgatgccgtacgtatcgaacaccgcgtggccggcgccgacgccaacccttatctgctgatggcttcggtcctggcaggcgtgcaccacggcctgaccaacaagatcgagcctggcgcaccggtggaaggcaacagctacgagcagaacgaacagagcctgccgaacaacctgcgcgatgcactgcgtgagttggacgacagcgaggtgatggccaagtacatcgatcctaaatacatcgatatcttcgtcgcctgtaaggaaagtgagctggaagagttcgaacactccatctccgaccttgagtacaactggtacttgcataccgtctaaacgacggctgcatcaaatgtggtgagcgggcttgttgtggcgagcaggcttgccctgcgttgggctgcgaagcagccctgaatccagacgccgagttctttcagaaggaactcggtgttttttattggggccgctgcgcggcccaacgcggggcaagcccgctcgccacacatacacagtcgcctcacaggtatggatcatccttatgctctgcgtacaatgcgctcagccttgtaggagacttccatgaccacccgccccgcgccccttcgcaaaccccgcgcccgcagccaggcccggatcgatgcgatcctcgacgccgcccgcaccttgctggctgccgaaggcgtggcgggtttgtcgatctacggcgtggccgagcgggcgcagattccgccgtcgtcggtgtatcacttcttcgccagtgtgccggcgctgttggaagccttgaccgccgatgtgcacgccgctttccgggcggcgattcaggcgcccatcgagcatgactcactcaagcactggcgcgacctgtcctgcatcgttgaacagcgcatgctcagcatctacgagcacgacgccgccgcgcgtcagctgatcctggcgcagcatgggctgactgaagtaacccaggcggatcgtcagcatgatctggagctgggcgacctgatgctcaccgtgttcaaccgtcactttgaagtgccgacgctaccgaaggatgtggatgtatttgccctggcgctggagctgagcgaccgcgtgtatgcgcgctcggtgcatcagcatgggctgatcacgccgcgtatggcgcaggaggggatgcgggtgtttgatgcctatgtggggctgtacctgccgccctacctgcccaagcgttaattttgtgggggccgggccggcctcatcgggggcaagccccctcccacattttgaatgtattcacaaatcaaagtgtgggagggggcttgcccccgatggcggtctcaagcgccatcacaacttggcgatcgacacctcggtggacttcacgaaggcaatcacttcgctgccaatcaccagttccagctccttgaccgagcgggtggtgatcacggaggtgacaataccggacgcggtctgcacgtcgatttccgacagcacgtcgccttcgacgatttccttgatggtgcctttgaattggttacgcacgttgatggctttaatagtcatggtgttcttccttcaggggacgagtgagttattgagcccaacgcaattgcgtaggcagcggtgaaacaggttcgggttccggtggcgagcccggcagggacaacacacggttgagcacttcagcctccaacgcggccaggcgatgcgagccccgggcacgcgggcgtggcaggtcgacgatcaggtcaagaccgatctcgccgtcttcgatcaggatcacccgatcggcaatcgccacggcttcactgacgtcatgggtcaccagcaacacggtgaagccgtgcttctgccagaggttttcgatcagttgctgcatctcgatgcgggtcagggcatccagcgcgcccaacggttcgtccagcaacagcaggcgcggttggtggatcaacgcgcgggccagggccacgcgttgcttttgcccaccggacagcgccgccggccactcgttggcacgttcggcgaggccaaccgcttccagggcctccaacgctttgggccgccagtcacccttgaggcccaggcccacgttgtcgatgatctttttccacggcagcaggcgcgcttcctggaacatcaaccgcgtgtcttcaatcgcttcgctcagtggtgcggagccggccagcagctcgccgccgctggctttgtccagcccggccagcaggcgcaacaaggtacttttaccgcagccactgcgaccgaccaccgccacgaattggccggctggaatgtgcaggtcgatgtccttgagcacttcgcgcgcgccaaaggccttgcgcaacttgcgtactgccagggggatacccttgagcaggcgcggaggttgttgagctgtcatgccgcacctcctttattcacttgatacgccgggtgccagcgcagccacacacgctccaggccacgagcggccaggtcggcgagtttgccgaggatggcgtacatgacgatggccaataccaccacgtcggtttgcaggaattcccgggcgttcatcgccaggtagccgatgcccgagctggccgagatggtttccgccacgatcagcgtcagccacatgaagcccagggcaaagcgcacgcccaccaggatcgacggcagcgcgcccggcaggatcacctggcgaaacaggctgaacccggacaagccgtagctgcgcgacatctccaccaacgccgggtcgacgttgcggatgccgtggtaggtattcaggtagatcgggaacagcgtgccgagggcgaccaggaaaatcttcgccgtctcatcaatgccgaaccacaggatcaccagcggaatcagcgccaggtgcggcacgttacggatcatctgcaccgaactgtccagcaggcgttcgccccacttcgacagaccagtgataaagcccaggaccaggccgatgctgccgccgatcacaaaccccaggccggcacgccagccactgatcgccaggtgcgtccagatttcaccgctggcaaccagatgcacaccggccgcaatcacggcactaggcgccggcaggatacgggtcgacaaccagcccgccgacaccgacaactgccacaccgcgagcaatagcaccggcagaatccagggcgccacacggtggcttagtttttcatagctcatggtgcggcctcagctctgcgacgcagctttgggaaggatgtcgttggccaccatctcgccgaacgggctgacgtagccggcgcttttcggcagctcgggacgttcgatatccaggtgcggaaacagcaactcggcgacgcgatacgactcttccaggtgtggataaccggagaagatgaatgtatcgatacccagcgccgcgtattccttgacgcgctccgccacggtcgggccatcgccgaccagcgcggtgcccgcaccaccacgcaccaggccgacaccggcccacaggttggggctgacttcgaggttgtcgcggttgccaccgtgcaacgccgccatgcgttgctggccgacggaatcaaagcgtgccagggaggcctgggcacgggcgatggtctcgtcgtccaggtgggagatcagtttgtcggcggccttccatgcttcttcgttggtttcacgcacgatcacatgcaggcggataccaaagcgcacggtacgcccgagcttggcggccttggcccgtacctgttcgattttttccgcgacagcggccggtggctcgccccaagtcagcaccatttccacctgctcggctgccaggtcctgggccgcttcggaggaaccgccgaagtacagtggcggacgcggttgctggattggcggataaagcagcttggcgcctttgacgctgatgtgcgcgccgtcgtaatccacggtctcgccctccagcacacgccgccagatgcgggtgaattccaccgaggcttgataacgctcttcatggctgagaaacaagccatcgccggccaactcttccggatcaccgccggtgaccaggttgaacaacgcacgcccgccagacaggcggtccagggtcgcggcctgacgcgcggccaccgtcggggaaatgatcccggggcgcagcgcgacaaggaatttcaaacgctgggtcaccgggatcagcgaagcggccaccagccacgagtcttcgcaggagcgcccggtcgggatcagcaccccgccgaagcccaggcggtcggcggcctgggccacttgctgcaaataaccgtggtcaacggcgcgagcgccttcggcggtgccaaggtagtggccgtcgccgtgggtaggcaggaaccagaaaatattgaggctcatggagttgtctcctgaagaagtcggattacggcgctttggcaacggcggcgggtggcgtccagatcacgtccttgatgctcaagggtttggggatcaatttgagttggtagaagctgtcggcgattttctgttgggcggcgaccacttccggggtcaggaacaatgcgccatagccttggcgcttcaccgaggtcagggtgatgtcagccggcagaccgagcagcggtgcgacttgttcggtgacttcctggggattggccttggaccattcgcccacggcgcgcacttcttccaccagcgccttgatcacttctggatgttgttcggcgtagggcttggtcgccaggtagaactgatggttgtcggcgataccggtaccatcacgcagggtgcgggcttgcagctgtttctcggcggcggcctggtacgggtcccagatcacccaggcgtccacgctgccacgctcgaaagcggcacgggcatcggcgggcggcaggaacacggtctgcacgtcggtgtatttcaggccggcgtcttccagggcacgtaccaacaggtagtgcacgttggagcctttgttgagcacgatttttttgcccttgagctcggccacggatttgatcggtgagtctttcggcaccaggatcgcttcactggtcggcgccggtggttcgtaggctacgtagagcaggtcggcgccggcggcctgggcgaacaccggcggggtttcgccggtcacgccgaagtcgatggagccgacattcaggccttcaagcaactgggggccgccagggaactcggtccattgcacgttgacgccttgggccgccaggcgtttttccagggtgcccttggccttgagcagcaccagcgtgccgtatttctgatagccgatccgcagggtctcggccgcttgagcttgaacaatggcgccgaaggacacagccgcagcaaacagtgcgaccagaccacgacgcaagatgacagtgcgcatggcgctctctccaaaaatgcgattaggggttttggctgcacctgcttggccgttggcggctgagtaaggtgagtgtttcttttatatcggtgaggctcagatgctccagcgagcactcaacagacgttcattcaacacgtgggggtccagcggtttcgggcgacgggccatggcgccgtaaagtgtttccagggcttcgtgcaaacgctgttcaagtaccggcaccaattgcgcctgggcactgccttcgccgtacgcgatctggctgtcttcggcaaagatgccgtggagcaactcctgggctttcaacgccgacagcaccggcttcaatgcgtagtccaccgccagcatgtgggcgatgctgccgccggtggccatcggcaacacgatcttgtgggccagggcgcgttcaggcagcaggtccagcacggtcttcagcgcgccggagaacgaggccttgtacaccggcgtggcgatcaccaggccatcggcgttggcgacttgctgcagcaggtcgatgaccttggggctgtcgaagcgcgcatgcagcaggtcctcagccgggaagtcccgtatctggtaactcaccacttctacgcctttgtcttgcaaccactgacgggttttatccagcaacaccccggagcgcgaacgctggctgggactgcctccaagtgttacgaccaacatgcaggaattccttgagcaggtgtcggcggttcgctgtgtggcgatggcgccaagatggaacagaccttatcagcagattcatatatctataaatcttattttttcatttgtttattctctaaatgcatatgagagttatagatctccaggcgaaaaaaaaggccgtcgaaacggcctgaaaacccctgctatgtgattcggtttacatctcaattctgtggtacatgcaccgccgccatcgcgggcaagcccggctcccacagnnnnnnnnnnnnnnctgtgggagccgggcttgcccgcgatggcgatttcagcatcaacgattgggctgcggggtgaggcgcaggtacggcttcaccgcgcgataacccttcggaaagcgtttcttgatctcttcctcgtccttgagcgacggcacgatcaccacttcatcgccgtcctgccagttggcgggcgtggcgaccttgtggttgtcggtgagctgcaacgagtcgatgacccgcaggatttcgtggaaattacgcccggtactggccgggtaggtgatggtcaggcggatcttcttgttcgggtcgatcacgaacaaggaacgcacggtgagggtgtcactggcgttggggtggatcaggtcgtacaggtcggacactttgcgatcggcgtcggccaggatcgggaagttgacgaccgtgttctgggtttcgttgatgtcttcgatccacttgtggtgcgagtccaccgggtcgaccgacagggcgatggccttgacgccacgctgggcgaattcgtccttgagcttggcggtaaaacccagttcggtggtgcacaccggagtgaaatccgccgggtgggaaaacagcacaccccagctatcgcccagccattcgtggaaacgaatcgtgccagcgctggaatcctgttcgaagtcgggggcgatatcgccaagtcttaggctcatggtgtggctcctgatgagtgcttatggagccaactgtgcatggattgcggattatttaaaaagaataaatatcgatttatctagacgataaaggaatattaaaaatctgttcattggacgtgggtgcaggcgaggagcaacatcgttttcaaggttcgagaaggccttgagacgctgcacaaagaggggttcaggaagggcctgcgggggtttggcccgacttgaaagcaagacaccctgcccggtgttgcaccgggcagggctttacaggcttacaacagcgtcacgctactagaacagtggcagcgagtagctgacgatcagacggttttcgtcctgggaacgggtgttcgccaggtcggtacgccacatagcgtttttccaggcaacgccgaggtttttcagcggaccttctggaatcacgtaggcaacggtgatgtcgcgttcccactcggattgaccggtggtttcggcacggccgttgttgttggcgatggtgtcgatgtcgctacctttgaggtaaacaacaccagcggtcaggccaggtacaccgacttttgcgaagtcataggcgtagcgagcttgccaggtacgctcgccagcgcgggcgaacttctggatctgcatgtcggtagtgatgtaagccgacgagccgtcaccctggttcaaccaagggaagtcgctgctgccattgctgacctggtaaccaccaccgaaggtgtgaccggcaacggtgtacaggaacaggccgctgtacaggttgttgtcgaccttgcctttaccggcgttgaagttgttgtagttaccgctggagtagtaagcggcggtgtcgccgttcttgccatcgtccgagctgttgaaataacgcaggtcagacttcagaacgcccgggccgattgcccagttgtgggtcagacccaggaagtgctgcttgtagaagtcttccagattgccgtagtagtactgggcagtcaggtctttggtcagcttgtagtcaccaccggcgtagtagaacttgttgctgaacttgccggcgttgtagttggagctaccgttggcgccgccaatcgacaggttttcgttgttgctggagttacggcccttggccttttccacctgaccggccaccaaggtcaaatccttgatgtcgttggtggtgatctggccaccttggaaggtttgcggcagcagacgaccatcgttggtcacgataaccggcagttttggctgcagggtacccagcttcagttcggtctgggagatcttcaccttaccggtcacgcccaggctggcgtaatcgtggacggctttgttgccgtcgcttgggaagatggtgccgccggaagcggtgccggtgtagttaccgtgatcagcacggctcgaatccagacgcacgccgtacaggccgatcgcgtcaacaccgaactgaacggtaccttgggtgtaacccgagatgaaacgcagatcgaagccttggccccattcagcgtttttgctacgtgtgttggacgtggcgttagggtggccgtcacggttatcagtgttgatgtagaagttacgcagccccagtgttgccttactgtcttcgatgaaaccggcggagtttgcctgctgggcaatcgcagccaaagctacggccaacgccaatgttgacttcttcatgtaccgctcctctcatttctaatttttgtatttctttggtctcgggtctgacgccctcgatccacagatgcccgattagcgccagatagtgactaccaagtcaatcgtaaccttgtgtgtctactaccttcgtctaatcgcagttgatttggtccctgcagggtaatgagtttttcatacacccaaaaagaattgtttcattctttttcatacgattcgggaataagccttttcatgacgcggacccgtcagggtagacgacccactccataagctaatgcctaaaaggtatttgttagcgcttttttagatcgtttagtgtggccgtactgttgcatacgtcacccacgatcaaaaaggcgacgccatcatggccaaacgcacatcctcccgtcaatttgttacagtttttgtgtcactaatactttcttttggtgtcaaagccgccgatttgaccatcggcgagaaaattgcctagtgccgtttcaacagtgggccggaagtcgtaaccgccatcgcctcgggcgacttgcgaatcggcaacctcggttccagccctcttgccgcagtggcatagcggaatctatccatcgtcgcgttcatcgtatcggcccagatcaatacttctgaagcatgggtggtgcgtaatgacagccacattgacgcacccagggatttgatcggtaaaaccatcgccacgccgtttgtcattagtggatacggaaccggtgcacaaaatcgcgaaaatgacaggcgccaacgccgcagacactcctgagctgctggcaggcacgacattcccggatgcccaggcacaacaagccgatgcgctgctaaaaggcggcacggcaaagtttttgaaggaaaagggaaaggtggaggtggtgctgccggattacttggccttggtgactgacaaatttatcagtccgagaactgatccatgtgggagcgggcttgctcccacattttttgacctgagtcgttcccgaaatcgaggttacagggccttctcgaaaatcttcgaattacgctgatagttgtacagggacgcccgcgcagacggcagacggtcaacactgctcggctcaaacccccgctcacggaaccagtgggcggtgcgggtggtgaggacaaacaaggtcttcaacccctgcgcccgggcacgggcctggatgcgctccagcaacacatcaccacgtgcgccatgacggtactccgggttcactgccaggcaagccaactcacccgcgtccgaatcggcaatctgatacagcgccgcacaggcgatgatcatgccttcgcgctccaccacgctgaactgctcgatctcacgctccagcacttcccgcgaacggcgtaccaggatgccctgctcttccagcgggctgatcaggtcaagcaaaccgccgacatcctcaatcgccgcttcgcgcacctgctcgaattgctcctgggccaccagcgtaccgccgccgtcccgggtaaacagctcggtgagcaaggcgccgtcttcggcatagctgacaatatggctgcgccctactccaccccggcacgcttcggcggcggcatcgagcaattcggcctgatagttggttttgcccaggcgttgcaggtgagccggcacctgttgcgggcgcaactcgcgtaccaggcgaccattttcatcgatcaagcccatatcggcgccaaacaacagcagcttgtcggcgcccaggtcgatggcggcgcgggtggcgacgtcttcgcaggccaggttgaagatctccccggtcggcgagtagcccaacggcgacagcagcacgatggagcgttcgtccaacaggcggttgatgcccttgcggtctacgcggcgtacttcgccggtgtggtggtagtccacgccatccaatacaccgatgggacgtgcggtcacgaaattaccgctggttacacgcaggcgcgagccctgcatcggcgacgaggccatgtccatcgataggcgagcttcaatggcgatgcgcaggtggccgaccgcgtcgatcacgcactccagcgtcgccgcgtcagtgatgcgcatgccttcgtggtaagtcgggatcaggccacgcgcttcaaggcgcacttcgatctgtggccgcgaaccgtggaccagtaccaagcgcacgcccaggctgtgcagcagcaccaggtcgtggacgatattgccgaagttgggatgctccacaccgtcgccgggcagcatgaccacaaaggtacagtcgcggtgggcattgatgtagggggacgcgtgacgaagccagttaacgtagtcgggcatagaacctgggcctgtaataaaaagcagccgaaaaaggatgaatcatgaaagcgcacggcgggctgatggttatcgtcggaacaggcttggcgacacgctcactctccttctatgtacgaacaggcaggggttaatttatgcaggtttcaggcagtaatgttcgatcagttcccgcaatagacgcactgtaggcgtcaagcgtgacatttcgaggtattcgcccggctggtgcgcgcaggcgatgtcgccggggccgagcaccagggtttcacaaccaaggcgctgaagataaggcgcttcggtgccgaacgctactgcttcggcacgatggccggtcaatcgttccgccacccgcaccagttcggcgtcttccggttgctcgaagggcggtacctcggggaacagcggcgcgtagtcaatcttgacctgatggcgctcggccaacggctggagcttctggcggatcgcatcacgcagcacctgagggtccatgcccggcagtgggcgcaggtcgaactccagggaacactggccgcagatgcggttggggttgtcgccgccgtggatacagccgaagttcatggtcggctgcggcacgctgaattgcgggttgcggtactcgcgctgccaggctaggcgcaggccgcgcagttcgccgatggcgtcgtgcatggcttcaagcgcgctgtggcccaggctcgggtccgacgaatggccgctttggccaagaatatcgatgcgctccatcatcacgcctttatgcaggcggatcggtttgaggccagtcggctcgccgatcaccgctgcgcggcccaatggacggcccgcctcggccagtgcacgggcgccggacatggagctttcctcgtcgcacgtggcgagaatcagcagcggctgtttgaatggctgatccagcagcggcaacactgcttcaatggccagcgcgaaaaagcccttcatgtcgcagctgcccaagcctacccaacggccgtcgacttccgtcagcttgagcgggtcggtcttccacagcgctgcgtcataagggacggtatcactatgacccgccagcaccaggccaccgggcccactgccgtaactggccaacaggttgaacttgccggggctgacctgttggatatcgatggcgaaacccagatcccccagccaagcggcgagcaagtcgatcaccgggcggttggtctggtcgagagacgcctgggtgcagctcacggatggcgcagcaatcagcgcggcaaactgctctttcatggacggtaacggcatgctcggcctctcgacttcccggatgaacctcactatagagccatctgcacgacacaataaaccgttgcggcacgttgccgggctcagtcctgtacactgcacgaccttggcagccactcttttacccggctgcgctcccgatcctggatgttccggccatgcaaaaagaaactgaaatcaagctccgcgtcagccgcgagaccctcgccgcgctgcgtgagcacccgctcctgaaaaaacgcaacaaaagtggctgggaacgccgtgagttgatgaaccagtacttcgacactcccgagcgcgacctggcccaggccaaagtcgccctgcgcctgcgcaaggacggtgacgacatcattcagaccctcaagacccgtggccagagcgtcgccggcttgtcggaacgtaacgaatacaactgggaactgcccaaagccaagctcgacgtaaagaaactcgacggcgaatgctggcccgagcaactggccgagctggacaaaaagaccctcaagccgatcttcaccaccgacttcgtgcgtgagcgcgccgaaatcgcctgggggcgcggcaaggccaaggtggtgatcgaagccgccctggacctgggccacgtggtggtcggcaagcagaaagaagaaatctgcgagctggaactggaactgcgcgaaggcgaaccgtctgccctgctggaactggccgccgaactggccgcgaccctggcgttgatgccgtgcgatatcagcaaggccgagcgcggctaccgcctgtacgacgccagcagctactccctgagccttccggcgccacagttgcacgccgaaatgccgctggatgacgccttcgccgcaatcatgtggcacctgctgggcagcagccaacgcctggccgagcaataccgtttcaatggccactggcgcctgctgcaagactgggtcgacaacctcggcgaactgcgtgccctggtcggcagcctcggccaggcggcaccgcgtcagtccaccagcgagctgcgcagcgcactcgatgccctgctggaagactggcgtccactggtacaggccggtgatgacgacgaagacatccgcaaagccgcgccggagcagttcgccgaagaactggacgacgtgcgctggggcctgttctcgctgaacgcttcacgctggctgctggcccgcacctggaccgcggaccgcaacgtgcgtggcaaccgccaaggcgccgcgcaaatcaccaactggctgccgcgcctgctggccgacgatgccgtcgccctgcaactgccgcgctaccagcaacagccggaagacctggccgagcaattgccacgcatcgagcgtatccaggcctggctgcaccatgcgcgtcaggtggtcgacattcccgaactggaccgtctgtacggcgagctgaacaagttggtgcaactggccaaccagccgatcaccgatgagtcgctggatgcgcggatgcatcaggcgattgcggtgtatcagaaccgggcgtggaagaccttgttgcgcctgtaaggccgctttcgcgggcaagcccgctcccacactgactgggttcacacatagaaatctgtgaacccaatccaatgtgggagccgggcttgcccgcgatgaggccatccctgtcagcgcaatactggcaggctggtggtggatttgatctcggacaaagccacaatcgaattgacctcctgaatccccggcaccatcgacagcttctcgaagaaaaaccgctcatacgcctcgatgtccgaggtgacgatgcgcagtagaaaatccaccgcccccatcagcacataacactccagcacttccggaaacccgcgaatcgcgtcggtgaactcggtgaagttggaacgaccgtgggcgttgagtttcacttcggcgaatatctgcgtgttgaggccgatcttcttgcgatccagcaaggtcacctggccgcgaatcacgccctcttccttgagccgttggatgcgtcgccagcaaggcgactgggaaaggcccacctgttcggcgatctgcgcgctggagagagaagcgtcttcttgcaacagggccaggatacggcggtcataggcgtccaactcgctgtgcatataaataccctccatcgcacttattctgaattgattgattcgattttttacaaaacaggcccatcttagataagaaatctccggtggcgaatgtaaaaatttctccagtcgaatctggagctttcccatgcacgccgtcgaaaccaaccaccccgctacccgcgtcgatgcgtgggccgtcaacaacgcccattgccaggcgcattaccagatcgtcgccgaggcggagcccgacgtggtgtgccgggtacttaactacttcgccctgcaatgcctcacgccgcaacaggtcacggtcaaccgcgaagaagacctgttgaacatcggcatcgtcatggacggcctgagctggcaccgcgcccaggtgatcggtgaaaagattcgaaacctgatcagcgtgtgcgcgctggacgtgtggtcggctgatgccgcggggcctctggcagtggtggcggtcgctcagtaagaacctgcaatacacgccgggaggaagatatccaggggctggctagcctgggatttacgcccactgccctcaggaaaaccttcatgccggttgatcaacgcttggaactgcatcaactgctgccggctttgcttgaagggcgactgatcaccccagaagttgcacagcagttgtcggcgctgccggccagcaacaccttgcatcccctggaacgcatcgcagcccttggccccagcctggaaaccctgtccgaatggctggcccagcatgccgggcaaccgtacctgcgtatcgacccgttgaagatcgatgtggcgacggtcgtgccgctcatgtcccacgcgttcgcccaacgccactcgatccttgcggtggcggtggacgcgcagacggtcaccgtcgccagcgcccagccacacgtcaccagttgggaagccgggctggcgcaggtgctcaagcgctcgatcaagcgtgtggtcgccaacccccaggacataacgcgctgtatcggcgagttctaccggctggcgaagtccgtcagcggcgccgatcaaaaagttgcggcaccgggcaacaacgaactgctcaacctcggcgccagcgaccaggagccggatgccaacgacgcacatatcgtcaacatcgtcgactggctgttgcaatacgctttcggccagcgcgccagcgatatccacattgagccgtgccgagaacagggccgtgtgcgctttcgtatcgacgggttgttgcacgacgtctatcagttcccgccccaggtcacgatggcagtggtcagccgcctcaaaagcctgggccgcatgaatgtggcggaaaagcgcaggccccaggacggtcgggtcaagaccaaaagcccgaccggagcggaagtggagctgcgcctgtccaccttgcccacggcgtttggcgaaaagctggtgatgcggatcttcgacccacaagtactgctcaagggctttgaccagcttggtttatcggttgaggaccagcaacgctggcaagccatgacgagccagaccaacggcatcatcctggttaccggccctaccggttcaggcaagaccagcaccctctacaccacgctcaagcaattggccacgcgggaggtcaacctgtgcaccgtggaagatccgatcgagatggtcgagccggcgttcaaccagatgcaggtgcagcacaatatcgacctgaccttcgccagcggcatccgcgccctgctccgccaggacccggacatcatcatgatcggcgagatccgcgaccaggagaccgccgaaatggcgatccaggccgcattgaccgggcacatggtgctgtcgaccctgcataccaacgatgcgcccagcgccatcagccgcttgcaggaactgggcattgcgcattatttgatcaaggccaccttgctcggcgtaatggcgcagcgtttggtgcgggtcttatgcccgcactgcaagcggtctctgggtgacgcccatgaagcggtcgggtgcgttgaatgtcgacacagcggttatcaggggcgggccggcgtttacgaaatcatggttttgaacgaagcgctcaacacattgatcacgcctggggccgatgtgcaggccctgcgccaggccgcagttacccacggcatgtgcagcttgcgcatggccggcatgcagaaggtcgcggcgggggtcaccacgatggcggaagtcttgcgggtgactcccggggattcggtaacaaatcctttgtttgtcaggcagtgaaaccgttcttatcggtgacaacaccgttacaatcggcccaacgtcgtttcactgacaccatcagatagggaatcgctatgcagatcggaaccgtactgcttcttttcgtgggtttggccatcgccatcctgttcatgggcttcaaggtggtcccccagggctaccaatggacggtcgagcgttttggccgttacaccaacaccctcaagcctggcttgaacatcatcatcccggtcatggaccgcatcggtcgcaagatcaacgtgatggaaagcgtactggatatcccgccccaggaagtcatcaccgccgacaacgccaccgtgcagatcgacgccgtgtgcttcttccaggtggtaaacaccgcccaggccgcctacgaggtcaacaacctcgaacacgccatccgcaacctgctgcaaaccaacatccgtaccgtgctcggctccatggaactggatgccatgctcagccagcgtgacggcatcaacgaaaaactgctgaagaccgtggacgaagccaccgcgccgtgggggatcaagatcacccgtatcgagatcaaggacatcagcccgcctgccgacctgatggccgccatgtcgggccagatgaaagccgaacggatcaagcgtgcgcagatcctcgaagccgaaggcctgcgcgcctcggcgatcctgactgccgaaggcaagaagcaggcacagattctcgaggccgaaggtagccggcaggcggcgttccttgaatccgaagcccgtgagcgtcaggccgaagccgaagcacgcgccacacaggtggtgtcggaagcgatcgcatcaggcaacgtgcaggcggtcaattacttcgtcgcacagaaatacatcgacgccctgggcaagctggcctcggccaacaacagcaaggtcatcctgatgccgctggaggccagccaggtgatcggcgcagttggcggtatcggcgagatcgtcaaggcaacgttcgacaacaagaaaggctgaggccagcgccatgtgggatttcctgcagcatctgtcgttctgggattggttggcactgggcacagtactgctgattcttgaggtattcggcgctggcggttacctgttgtggatgggtatcgccgcagccgccgtgggcgtgatcaagtttctggtgccacccctggggctggaatggcaacttctgctgtttgccgtgttgtcgataatgacggcggtgtactggtggaagcgtcagcgcagcagcgccaaggccagcgaccagccgggtctcaacgagcgcggttccgagctgatcggccgcaccttcgtggtgcaccaggcgattgtggatggccggggcaaggtaaaagtcggtgatggcgtatggatggtgaccggcccggacagccccgtaggcgctcaagtgcgggtggttggccaggaaggcgtggtgttaagggttgaaactgtttagtcagtgatggaactcggttgggctaactacaatcataaagtacagataacccacccggagtcacccatcatgcgtctcaaatatgctgtcgcaacccttgctgtgctttccctccctgtcggatcagccatggccgacagtttctggcgcaatgtcatctcgtcgggcgccaccaccggctcgacgtacctgacgttcaaggaccacaagctggtggtcgccgcccaagacgacgccggcagcttcgttgccagcgatggcggcatccgtggcccatacctggaagccgcgatgcagaaagtccgcgccgacaaccctggcctgcaggccacggacatggagctggccaacgctatcctcgcgaaaaatgcagtcaccgaataactcgggctcaataaaaatgccgctgttaacagcggcatttttttgtcctcaattcctacggtcatcatcgctgggcactacacgagcattgctgttttcccaactgcatacagagaagtcctgtcgagcctcactctgccgggccacaagctaaggattcctttttgaacaaagcgaatcactgcccatgcacaagattgcctacgcactgctgttctctgcatttgccaccgcctacgcccaggcagaaagctggtacggatcagccaaattcaacagcgctcgccagaacctctccagttcactgctcaccagcccgcgcgtgacggacagggtggacgccccggatagcagcaaagcattcgtggcctctttcgccgcaggctatgccttcgccaatggctggcgcctggaaggggagtacacgatgccaaacagttcgaccttcaaatcctactgggcccccttcaatgccaacgtcaacagcctgcatgtgcagagccagcgcttgatgctcaacggctataaagatatcccgatcaaccagtggctatcgttttacggtatggccggtgtgggcatcgcacgcattgagtccgaaggttatcaaaccattgagacccgtcgttttgccagcaaccgccaacataaccttgcctatagcctgggtattgggctggaggccaaggccagtgagcgactcacgttaggggcgggttatcgttacaccgccatgggcgacgtcgaaaccggttacaacaccttcacgaaccgcgcaaatgcacgggatgagcaactcaaaggcaaactcaaggagcagaacatgttcctggaagcgcggcttgccttctgattatttgcgaagaatgccgccttcgacgtggcattcttcggctcaatagtgacgattcattcacagatgacaggctatattcagtcaagccgtgcaaccatgccggtactgatacctcgcttactcatcgccaacctgaaacggatgccttcgtcgtcatgagccaactgcccttcctgccgttttccaaacccaccatcgatgaagccaccattgcagcggtcggcgatgtactgcgctcgggctggatcaccagcgggccgaaggtgcaggccttcgaagctcagttgtcggagtactttggcggtcggccggtgcgcaccttcaactcgggcacctgcaccatggagattgccttgcgcattgccggcatcgggccaggcgatgaagtcatcaccacgccgatttcctgggtagccacggccaacgtgattctggaagtgggcgctacgccggtgtttgccgatattgacccggtgacccgcaatatcgacctgtcccaggtggaagcggcgattaccccgcgcaccaaggcgatcatcccggtttacctggccggcctgcccctggatatgccgatgctgtatgcactggcgaacaagtacaacctgcgcattatcgaagatgcggcgcaggcgctgggttccagctgggatggcgagcgtattggcgccaccggggattttgtgtcgttcagtttccaggccaacaagaacatcacctcttccgagggcggctgcctggtgttgaacaacgccgaagaagcgcgactggcagaaaaataccgcctgcaaggtgttacccgtaccggcttcgacggcctggacgtggatgtattaggcggcaagttcaacatgaccgacatcgccgccgccattggcctggggcaatttgcccatatcgagcagatcactgctcaccgccagaacctggcgcggcactacttcaaatgctttggcagtgactttgaagagcagtacggcgcacaactgccgccggcagacttcgaaaacagcaactggcacctgtttcaactggtgctgccggaacgtcaggacggcctgccagcccgcgccaccttcatggagcaaatgcaggcccatggcgtcggcattggctatcactacccgccgatccacctgctgagcctttatcgggcacaggggttcaaggaaggcatgttcccggtggcggagaaagtggggcgcttgatcgtgtcgttgccgatgtttacggcgatgacagaggcggatgtggagcggtcggtggcagccgtgaaggcagttctacagccctaaaagcacattgcgggagccgtataaccggctcccgcaacaggatcactcgccgatggcggctttgtagccggcagcatccagcaatttgtccaggtcagccgggttgcttggcttgagcttgaagatccaagcgccgtagggatcagagttcagcagctccgggctgccactcagttcttcgttgacggcaatcacttcgcctgcaaccggggcgtagatatccgaggcggccttgaccgactcaaccacacccgcctggccagcagcgtcaaactgggcgcccacttcggccaactcaacaaacaccacatcacccaacgcttcctgagcatggtcggaaataccgacggtcacggtgccgtcagcttccaggcgtgcccattcgtggctttcggcaaaacgcaggtcggcagggatatcgctcataatctgtgtcctcaagaagtaatgtcagcggccattggcctgccggaaataggttagatcaaggttttgccatggcgcacgaaggtcggtttgaccactcgaaccgggtaccacttgccgcggatttccacttcggcccgatcagcggttgccgtcggtacacgcgccagggcaatggatttgctcagcgtaggagagaaactaccactggtgatctccccttcgccaatattggcgatacgaaccacctggtgagcgcgcaaaaccccgcgttcttccagcaccagcccgaccagcttgaactgcaccccggctgctttttctgcttccagcgcggcgcggccaatgaaattacgctcggcaggctcccaggcgatgctccaggccatgttcgatgccaggggcgaaacctcctggtggatgtcctggccgtacaggttcatccccgcttccaggcgcagggtatcgcgggcgccgaggccgatgggtgaaataccagcgcccaccaggtcattgaaaaagcccggagcctgatcagcgggcaaaacaatctccaggccatcttcgccggtgtaacccgtgcgtgcgataaaccagtcaccatcggcgtggccttcgaagggcttgagctggtgaatcagggtgctgcgcgattgcgtgaccagttcggcgatcttttgccgggcgtggggaccttggatggccagcatggccaactcggggcgctcatgcagttgcacctgatagtcgcccagttgcgcttgcatccaggccatatcctggtcgcgggtggcagcgttgaccaccagccgataagcggcctcggtgcggtagacaatcatgtcgtccaccacgccgccctgttcgttgagcatggcgctgtacaacgcacggccgcagccgtgcaggcgttcgacatcattggccagcaggtgctggagccattccttggcctgggggccgctgacatcgatcacggtcatatgagatacatcgaacaccccgcagtcgcgtcgcacctgatggtgctcttcaacttgcgagccgtagtgcaaaggcatatcccaaccgccaaaatcgaccattttcgcgccaagggcgagatgcaggtcatacagaggcgtacgctgtcccatgggtttctccttccgggcttggcgaaggtgcgcggagctactgtccgcactgaacaccttgatttacaaggcctgcagccacgtccagcgacccgctccgaaagacgaagcgcaccgaatgccgcgcattgtagccgcaagccgtaggactggcacctaaccgatttgccgggcggagcgtcggatcagcccgatcaccggcaacaggcccaccagcaccagggtcaacgccggcaaagaggcccgtgcccactcgccctcactggtcatttcaaagatccgcactgccagcgtatcccagccaaacgggcgcatcagcaaggtggcgggcatttccttgagcacatcgacaaacaccaggagtgctgcgctcaaagtacccggcagcagcaacggcagatacactttgcaaaacagtcgtgggccactcacacctagactgcgtgcagcttccggcagggacgggcggatacgcgccaggctgttttccaacggcccataggccaccgccaggaaacgcaccaggtacgccagcaccaatgccgacaggctgcccaacagcaacggcttgcccgccccaccgagccagctggagacaggcaccaccagttcacggtccagatagctgaacgccaacatgatcgataccgccagcaccgagcccggcaaggcatagccgacgttggccaggctgataccggaacggatcgcccgtgtcggcgccaggcggttggcgaacgccagcaccagcgccacgctgaccgtgatcaaggccgcgatgccgcccaggtaaagcgtgtggaggatcaggcccgaatagcgctcatccagatcgaagcggccgcgctgccagaaccaggccaccagttgcaacatcgggatgacaaacgcgcaggcgaacaccaacccgcaccaactgctggccgcggccgccttgaacccgcgcaggtggtacaacgccttactacgtggccgttcattgctcggtcggctggcgccccgggcgcgccgctcgccgtacagcaccagcatcaccaccagcagcaacaggctggccaactgggcggcgctggaaaggctgaagaagccgtaccacgtcttgtagatggcggtggtgaacgtgtcgaagttgaacactgagaccgcgccgaaatccgccagggtttccatcaacgctaaggcgactccagccccaatcgccggccgcgccatgggcagggccacgtgccagaacgctcgccatggcgattgccccagcacccgcgcggcctccatcaggcctttgccctgggccaggaacgcggtgcgcgccaatagataaacatagggatagaacaccaggaccaggacgatgatcacaccgctggtggagcgcacccgtggcaggcgcagcccggtgccgaaccattcacgcaacagggtttgcacgggaccggagaagtccagcaggccgacaaacacaaaggccagcacataggcaggaatggcgaacggcaacatcaacgcccaatccagccagcgccgaccaggaaactcgcagaggctggtcaaccaggccaggctgacgcccaacagggtcacgccgataccgacgcccagcaccagggtgagcgtgttgcccagcaggcgcggcatctgggtttcccacaggtgcgaccagatctggttgtcgatactttgccaggacagcaacagcacgctcagcggcagcagtacgagggcggcgacggtgaagaccggcaggtaccagcggcgttgggcggggtgggccaaagtcagttctcagtgaatgtctttaattcaactcaatccaatgtgggagggggcttgcccccgatggcggtggatcagtccatgatgagtgaactgatatcccgctatcgggggcaagccccctcccacattttgaccagcagtgtgtcagttccagccggcgcgatccatcaggcggatcgcctcagcctggcgcttgcccgccacttccaccggcaaggtgtccgccacgaacttgccccaggtcgccacttcggctgacggcggcactgccgggttggccgggaactcctggttcacatcggcaaagatcttctgcgcctcaggcgtggtcatccactctaccagcgccttggcggcttccggatgcggcgcgtgctgggtcaggccgatacccgacaggttcacgtgcacgccacggtcgccctggttcggccagaacagcttcaccgccaggtccggtttctgcttgtgcaggcggccgtagtagtaggtgttgacgatacccacgtcgcattgcccggcgttgatggcttcgagcacagcgatgtcatcggagaacacgtcggtggacaggttgttgacccaacccttgacgatctcttcggtcttggccgcgccgtgggtttcgatcagggtggcggtcagcgactggttgtagacctttttcgccgtacgcaggcacaggcggccttcccactgtttgtcagccagggcttcgtaggtggtgaggtcacccggtttcacccggtcggtggaataggcgatggtccgtgcgcgcaggctcaagccggtccaggtgtgttttgacgagcgatattgcaggggaatgttcttgtcgatcaccggggaggtgaacggttgcaggatccccatctgctcggcctgccagaggttgccggcatccacggtgagcagaaggtcggcggtggcgtttgcgccctcggccttgatgcgctgcatcagcggcgcttccttgtcggtgatgaacttgacctgcacgccggttttctgggtgtaggcatcgaagaccggcttgatcagctcatcgatgcgcgaggagtagaccaccacttcgtcggcggcctgcacagtggtgctgccgatcagggtgagtgccagggcagtcaggaggcgcttgggtgccaacatgggtgcggtctctcatttgcaaaaagagggcaaatgataaggactcacatttggtagtgcttggtagaggcgttaccagatgttgcatgacggagattggttgtgggctgatggcctcatcgggggcaagccccctcccacaagggatcgcatttcaatatcagggtttcgcaaggtccgggagatcgccagtcaggccgagagcctgacgcacaaacacggccttggcctcgggcatctggtcgaccatcttcaacccggcgttacgcaaccagcgcaacggcagttggtcggcctggaacagtcgctcaaaaccttccatcgccgccatcagcgccaggttatgcggcatgcgccgacgctcgtaacggctcagtaccttaacgtccgccaggcgctcgccgcgctcggttgccgccaacagcacctcggccaacaccgctgcatcgaggaatcccaggttcacaccctgccccgccaacggatgaatgacgtgagccgcgtcgccgatcaaggccaggccttcggccacgtagcgcttggcgtggcgctgacgcaacggcacacatacgcgtgggtcggcgctgatcacgttgccgagtcgtccctcaaaggcgcgctccagctcgcgacagaagctttcatcatccagcgccatcaagcgctcggactcggccggcgtggtcgaccagacgatcgaacaccaatcctcctgcccatcccgctccagcggcaaaaacgccagcggacccatatcggtaaagcgttgccacgccgtacgctgatgcggctggctgctgcgcacgctggtgacgatggcgttatgcaggtaatcccactcacgggtcgcggtgcctgtcaggcggcgtacggcggagttggcaccatcggcggccaccaccagcggcgcgcgcaacgtgcggccatcggccagggtcagcagccagtcatcgccggaacggcgcatctgctccaggcgcgcattggccagcaggcccaggtcgcagtcgtgcagacggtcaagcaaggcatcctgcaccacgcggttctcgacgatatgcccgagcacctcggcatgcacgctggcggccgaaaagtggatctgcccggtgccgctgccgtcccacacctgcatctcgccgtaagggctggcgcggcgcgagacgatgccgtcccacacgcccagccgctccagaatgcgctggctggcggccgacaaggcgctcacacggggttcgaaggcggcctcgcggtcgaacggcttgacgctcagcgggctgccgtcgagcagcagcacctgcaggccgctgccctgcaacgccagcgccagggcgcttccgaccattccggccccgacaatcagcacatctgcgcgcatgtccatgctttaagcctgtctcactggcggcttgcgccgcacgtaaagggttttgtcgacccgcgccaccagggtgccggagccgtcatgaatctgcaccttgaggtggggcaggtacttctcgccaccttcggtgtgtcgacggacctcgtccagcaaggcctcgtcgatggaaaattcggcatacaccgggcctttgccgggcgaaatgaaatcgatactcgcggccttgtcccacacgatgtagtcgcggcccaggttctccatcagcatcaacatgtagaacgggtcaaccatcgaatacaggctgccgccgaattgcgtgccgacatagttgcggttgtaccagcccaggcccatgcgcactttgacgtgacgaaaatcggcgctcatgtgctgaacgctgacccccgcgcccaggtacggcgggtacagggtcatgacccaacgcaacaatctcgccttgcccaggcgcgcgatcaaccacttacgcatcgggacgcgtgcccaggcccatggcttgccgggcgaaccagcgtttggcgggcggcaacaaatccagccccagcagccccatgtttcggcccagggcgaccaacggttgggcgctgccgaacaggcgcgtgacctggtcggagaagcccacggtgagtttctggtccaggcgctggcgctcgcgatagccctgcaaggtggccagatcacccggcacctgcggcccggccagcaaggcctcggccagggcattcgcgtcacgcagggacaggttgaaaccctgcccggcaatcgggtgcaggctgtgggcggcgttgccaaggatggccaagtgcgagcgcacttgctcctcggcttccaccagcgtcagcggatacaggtgacgggcgccaacctgcttgagggtgcccaggcgatagccgaacacaccctgcaattcactgaggaaactgcgttcatcgagattggccaggcgctgcgcatccatgccgatgcgcgtccagaccagcgcgcagcggttgtctggcagcggcagcaaggccatcgggccttcatcggtgaagcgctcgaacgcctcgccgttgtgggcttcgctcggggtgatgttggcgatcagcgcgctctggttgtaggggcgggttttcacgccgatgcccagttgttcgcgcaggccggagcggccgccgtcagccagtacagcgagatcgcactccagcacggtttcatcgttaagggtcaggcggtagccatcgggaagcggctccatgcgcacgacttcggccgggcaacgccagctgaccacgtctttgtccaggccttgccacaggcattggcccagccaggcgttttccaccacgtaaccgagggccggcacgccctcttccatggcagacaagcgcgcggtggagaaacgcccacggtcggacacatggatctgcttgatcggctcggcgcggcgggaaatgtcctgccacaggcccaggcgctggtagatctgccgggcaccgaaggacagcgccgaggaacgcgcatcgtagctcggctggtagctgtcgcccggcgcgaagggttcgatcagcacgatcttccagccccgggccttggccccggcctgcaacgccagtgccaggctggcgcccaccaggccgccgccgatgatcgccaggttgacccggctcatcgcgcagccgccatcagcgcttcgatatcggcgacagtcttgggcacgccgccggtcaggatttcacagccttgcttggtcactaccacgtcgtcctcgatgcgtacgccaatgccacgccatttctttgccacgttctggttgtccggtgaaatgtagatccccggttccacggtcaacgccatgccgacttccagcacacgccattcaccgcccactttatattcgcccacatcgtgtacatccatgcccagccaatgaccggcacggtgcatgtaaaacaccttataggcttcgctggcgatcagttcgtcgacgtcaccctgcaacaaccccagcttgaccaacccggcggtgatgacccgtacggtcgcctcatgggcctggttccaatgcttgtccggggcgatctccgcgaaggcggcttcctgggaggccagcacaatctcgtagatcgctttctgttccggcgagaacttgccactgaccggccaggtgcgggtgatgtcgctggcatagcagtcgatctcgcaaccggcgtcgatcagcaccaggtcgccgtccttgagcaccgcgtcattctgctggtaatgcaggatgcagctgttgcgcccggcggcgacgatggaaccgtaggccggcattttcgcgccgcctttgcgaaattcataatccagctcggcttccaggctgaactcgtacagcccggcccggctggcctgcatcgccttcacgtgggccgcgcaagagattcgcgctgcctcgcgcatcaccttcacttccgccgccgatttatacaggcgcatgtcgtgcaacagatgatccagggcaacgaattcgttcggtggctgggcgcccaggtgggccttggagcggatcacgttgatccactccatcaggtgccggtcgaactcggcattgctgcccatggccgagtacacccggtcgcggccttcgataaggccgggcaggatgtcgtcgatatcggtgatggggaaggcatcgtcggcgccaaagtcacggattgcgccttcggtgccggcgcgcaggccgtcccacagttcgcgttcggcgttgcgttcgcggcagaacagcacgtactcgccgtgctggcgaccgggcatcagcacgatcaccgcttccggctcggggaagccgctcaggtactggaaatcactgtcctggcggtacacgtgttcgacatcgcgattgcggatcgccacggcggcggccggcaggatcgcgatgctgttgggttccatctgcgccatgagcgccttgcggcgccgggtgtattccgctttggggatatggatcatgggcagaggagtttcctttcttagtgcagcgacggcttgggtgcagccggctcagccgattttttggtctcggtgaacagcagcagcggcgcgacgcgcaggtattccatcacttccatgtagtcaccctcgccgtcttcggactcttccagggcgtcttgcacctgggagatggctgccaggtcctgcagcacttccttggcatcggtgctcagttccaggccgccggcgttcacgccgaagccgtggaggaagccctggcaccattggcccagtgcggcggcacgctcggctagcggcgcgtcgtcggtcggcagcagcaggaccacggtgacgtcatcaccggtcagctcgcccttgaccatctcttgtaggccgatcagcgcgttgcgcacgttgtcggtcggttcggtttccagcagctcggccacgtcggccagccagttgtcggcgtcgaagccgacgccggtgcagctacggcccagcaacacgccgtgcaattcggccggcgagcaggggtggccgctggtgctcagcagtttggagaaagcatcgtacggggagttctgaataggcatggtgagctaggcgccagacggcgcaatgtctagaatggagcgctgtatcctagcaccggcagacgtaccaagactatcaagggcgtcagatcgtttatcctgcagttgccattcatcagacaaatccagtggaacccaatggaagacaccgacctgcaagcgctgatggccagactcgaattgctaattactcgggtcgagcaacttaagagtcaaaacggactcctattagctcaggaaaagacctggcgcgaggaacgcgctcacctcattgaaaaaaacgaaatcgcccggcgtaaggtcgaatcgatgatttcgcgcctgaaggccctggagcaagactcatgagttcaagcaatagcgtcaccgtgcagatcctcgacaaagaatattcgatcatctgcccccaggaagagcgcaacaacctggtgagcgccgcccgctacctggacggcaagatgcgtgaaatccgcagcagcggcaaagtcatcggcgccgaccgcatcgccgtgatggccgccctgaacattacccacgatttgctgcataagcaggaacgccctgacgtgcaggccagcggttcgacgcgtgagcaggtgcgtgacttgctggagcgtgtcgatctggtgctttccagcgatgcagacgcacccaagggctgattgccgcgactgtttaaggtatactcgccccactccctggcgtgtttgccagtcggcgatgtccctgagccgattcgcactaccctggaagttgcacgttgggctggtgtgcatgtccgctagacggaaagccttaaagcctactgcatcttccaccttgaactttcgggttcaagggctaagtcgacagcggctctgtcggggagcctgaattcccaaactcaatgccagtcttcggactggcattgttttatgagccgaaaccatgaccgaacctgcgccgctttcccgtccgcaacttcgacgcatgttgcgcaaagcccgccgcgccctcacgccgagcgagcagcgcaaggccgcccacggcctgtatcggcaactggcacagcacccgctgtttcgccgggccaaacatatttccttatacctaccgacggacggtgaaatcgatccgcgcttgctgctgcgtgcagcacagcgccggggcaaggccacctacctgccggtgcttagcgcctggccacgtaccaagatggtgttccaacgggtcaagcctggtgagaagctgctgcccaatcgctttcgcatcctggaaccacgggtgaacatcagccgccaacgcaaagtctgggcgctggacctggtgctgctgccgttggtgggttttgatgatgccggcggacgcctgggcatgggcggcgggttctacgaccgcagcctggcttacctggcgcgccgccagagctggcgcaagccgacgctgctgggcctggcccatgaatgccagaaggtcgatcgattggcgcaggcgagctgggatgtgccgttggcgggcaccgtcaccgataagcattggtatattgcgaagacgccactggagtcagcggcgccttgaagaagggtcagcgcttgaacggttgcggctgctgctgagccagttcaacgggcgcatcggtcttgttcgaccacaagctttgggcatacccggtggtcacgacgcccagaccaaacaaaatcaccaaaatccatagtaaatccggtttacgttgcatcgattgccccccttcaggcacctcgtacacgatgacaacaacgttccaaagagtccgttgcagctgcgtcaagctttaaaagccggcattctgcggtaacgtgaaccaacacgcaaaccttggcgccaaccgactgtcggtttgtcatcaaattgcaggacaacttgcccaccgcttatttcaggagcccaacaatggcctattggctgatgaaatccgagcccgacgaactctccatcaaaggcctggaaaagcttggcgaagcccgctgggacggggtacgcaactaccaggcgcgtaacttcctgcgggccatggcggtgggtgacgaatttttcttctatcactccagttgcccggagccgggcattgccggcatcggcaaaatcatcgaggcggcctatccggatcccaccgcgttggagcccgaaagccactacttcgacgccaaggccaccccggagaaaaatccgtggagcgcgatcaacgttgcccatgtgcagacctttcccaaggtgctcggcctaggctacctgaagcaacaagccgccctcgccgaactgcccctggtgcaaaaaggcagccggctgtcggtgatggccgtcacgcccgagcaatggcacgccgtgatccatttgatttgactgaccggcatcaacgccccaccggggcaaaccgctcacactaggacgctaacgccgcaggaagcagccatgtcgacgaaccaccacacctcccgccttttcgccgttgccctcatcgccctgttgctgggtgccggtggcttcggttactggcgctccacccaggaccgcctgcccgaaggcctgagcatgggcaatgggcgcctggaatccaccgaagtgcagatcgccgccaagatccccgggcgcctggccgaagtgcgggtagacgaaggcgacaaggtgctcaagggccaactgcttgcacgcatggacacccgcaccctcgaagcccaacgcgcccaggccgaagccgaagtgctgcgcgccaaggaaaacttcgccgccgccgaggccaacgtgcaactgcgccagagcgagcaactgctggccaaccaggaactcaagcgcacccaggagctgtacaagcgcggcttcgccagcagccagctgattgatcaacagcaggcgcgacagaacaccggcaacgccgccgtgattgccgcgcaggcccaggtcaattcggtaaaggccgccattggcgccgccgaggcccaggtcgcccagctcaccagcgagatcgacgacagcagcctgcgcgcgcccatcgacggcgttatccagctacgcctggccgagccgggtgaagtgctgggcgcgggcggccgtgtactgctgttgatcgatcccaatgatcaacacatgaacctctacctgcccgcttccgtgaccggccgtctcaccgtcggcagcgacgcacgcatcctgctcgacgccctgcccgaccagccgctgccggccaggatcagcttcgtcgccgccaaatcccagttcacccccaaggaagtggaaacccgcgacgaacgccagaaactggtatttcgcgtcaaactgcgcctgacccaacccagcgctgtgccccaggccaaaccgggcatgcccggcgccggctatgtgcgcacggctgacatcgactggccggccaacctgcaatgaccgccctggcgctgcaggccacggggatcaaccaccgctacggcaaacagcaggccctggtcgacatcgccttcagcctgccggccggtacgcgctgcgggttgatcgggccggatggcgcgggcaagtcgagcctgctgggtttgatcgccggggttaaaaagctgcaggacggccagttgcaggtgcttggcggcgccatcgacgatcgccgccaccgcaacagcctgtatccgcgcattgcctttatgccccagggcctgggcggcaacctgtaccccgagctgtccatcagcgaaaacatccgtttctttgccacgctgttcggcctgtccaaagccgattgcgaccagcgcatgcacaacctgctgctggccaccgacctcgcacgcttcgccgagcgcccggccggcaagctctccggcggcatgaaacagaagcttggcctgtgctgcgcgctgatccacgacccggacctgttgatcctcgacgaacccaccaccggcgtcgacccactgtcacgtcggcgcttctgggaactggtcgacagcgtacgcagcgaacgcccgcaactgacattgctggtggccacggcctacatggaagaagccgagcagttcgaacactgcctgatgctcgatcgcggcaagctgatcgccgatggcctgagcagcgacttggccgccgcgacacccagcggcaaattggacgaagccttcacccacttccagggtgacagcgcccacgacaaccagccgctggtgattccgccgagggagagcgacaacaccgatgtcgccatcgaggcccatgacctgaccctgcgtttcggcgatttcaccgcggtgaacaaggtcagctttgcgattggtcgcggcgagatcttcggcttcctcggctccaacggctgcggcaagaccaccaccatgaaagtcctcaccgggctgatgccggccaccgagggcagcgcgacgctgctgggcaacccggtgaacgccaaggacctggccacgcgcaagcgcgtgggtttcatgtcgcaaagcttttcgctgtacggcgaactcagcgtgcgccagaacctggtgctgcatgcgcaactgttcgacctgcccaaggccgacagcggaccgcgcattgatgagctgatccagcgtttcgacttgggtgacgtcgccgaacaaccgtccggcgagctgcccctcggcctgcgccagcgtttgtcattggcggtggcggtgctgcatcgcccggaagtgctgatcctcgatgagcccacctcgggcgtcgacccagccgcacgggatgacttctggcgattgctgatcgagctgtcccgcgaacaaggtgtgaccatcttcctgtccacccacttcatgaacgaagcccagcgctgcgaccgcatctccctgatgcacgcgggcaaggtgctggcctgcgatacgccggatgcgctgcaacagcaattccacggcgatacgttggaagccgcgttcgtcacgtgcctggaacaggcccaaggtgaagccgaacccaccgcgccggccaagaccgtcagcgaaaccagcacagcgccagtgagtaaacgcggtttcagcctggcccgtctggtagccgtggccagccgcgaaggcaaggaactgctgcgcgacagagtgcgcatggccttcgccctgctgggggcgatgttcatgatggtgatcttcggctatggcatttccctggatgtggaaaacctcgccttcgccgtctacgaccaggaccagacgccgcaaagccgcgcctatctggaggcgtttcgcagttcgcgctatttcgctgagcaagcgccgatccaggactcgactgaactgcaccggcgcctgcaacgttcggaaatcaaactggccctggagatcccgcccggctttggccgcgacctctacgccggccgccagcccacggtggccgcgtggctggatggcggcatgccgtttcgcgcggaaaccagccgtaactatgtcgaggccgtgcaccaggagaacctgcagcaactggccgaactgagcagcctgccgcgcaacaccccggccgccgccaggctggaaacgcgctttcgctataaccaggacgtggtcagcgtaaacgccatcggccccggcgtgatggcgctgatcctggcgtttatcccggcgatgctcaccgcgctcggcatcgtgcgcgagaaagagctgggctcgatcaccaatttctacgccacgccgctgacccgcctggagtttctattgggcaaacaggcaccgtacctggccgtgagcctggtcaacctgacggtcttggtggcgatgaaccgctggctgttcggcgtgcccttcaagggcagcgccctcaccctggcgttcggcggcctgctctacgtgctggcgaccaccagcatgggcctgctgatttcggccttcacccgtacgcagatcgcggcgatcctaggcaccatgatcatcaccagtctgccgaccatccagttctccgggctgatcgtgccgcgctcgtccctggaaggcgcggcggccttgatgggcatgctgtttccggccgggcacttcctggacattgccgtgggcaccttcaccaaggccctggacctgcgccagttgtggccgcagtgcctggcgctgttcgggttcttcgtcgggtttaccgggctgagcctggtcatgctcaagaagcaggaggcctgatgcataagttcgcgcacattctgcggctggggatcaaggaactgaccagcctgcgccatgacagcgtgttgctgctgtttctgttctacgccttcaccgtcgccatctatatgcccgccgccggttcggtgatcggtgtacacaacgccagcgtggcatttgtcgatgaagaccacagcgctctctcgcggcagatggccgaagcgctgcaaccgcccgaattccaggcgcctgcaccgttggcctatgaccaattggacagagtcatggacagcggcaagtacactttcgtaatcaatgtgccggcgaatttccaggccgacctgttggcggggcgccagccgggggtgcaggtgaatgtggatgccacggcaatgagccaggcgttcatgggggcgggctacatcgggcggattttccagcgcgaactgctgacctacagcggacaagccgatgccgccagccgggcacccgcgcagctcactacccgggcgctgttcaataccaacctggaaggcggctggttcctggcggtgatccagatcgtcaacaacatcaccatcctcgccattatcctgaccggtaccgccctgctgcgtgagcgtgaacacggcaccctcgaccacctgctggtactgccgctgacggcgctggaaatcatgctggcgaaaatctggagcaacatgctggtggtggtgctgtgtacctggctgtcggtggaactggtggtcaagggcctgcttggggtgccgctggccggctcgctggggttgtttctgttcgtgaccgcgctgtacctgtttgccagtacggcgctggggattttcctggcgacgcttgcccgttccacaccgcaattcggcctgctggcaattccagtgattatcccgatgctgttgctctcaggcggcagtacgccgctggacagcatgcccgagtggttgcagtgggtgatgcaggggtcgccgtcgacgcattttgtgagtttgagtgcggcgattctgtttcgtgatgcgggggtgagcgtggtgtggccggatttgctggcactggcggggattgggttggtgttttttgcggtggcgttggcgcggttccgcaaaagcctcgcctcataagcctggatccggcttgttgtggtgagcgggcttgccccgcgctgggcnnnnnnnnnnnnnnnnnnnnnnnnnnnnnnnnnnnnnnnnnnnnnnnnnnnnnnnnnnnnnnnnnnnnnnnnnngcccagcgcggggcaagcccgctcaccacagaagccaggcccataacacttaggaggcttactggatgatcaggttgttgaacaacagatcttccaccaccggcttgcccgtctcgtcattcatcacttgctgggtctgcttcagggcttcctggcgcagtttttctttgccctcgacggtgctcatcgcctcgttggtctgctgggtgaacagggccaccaactggttacggatcaacgcatcgttggctttgacggcggcggccgcttcggtgccggtcacgcgcagggcaatgtcggccttgaacaccttgagtttcgccgtgccatccaggccgtagttgcccacgaacggcgggctcaggctgatatagctgaccttcggcgcctcgccctctttggcttcttcggcctgggccgccatcggcaaggtcagggccagcatcaacaggatccacgctttcacagttcattcctcacattcggttgccgggtagcataacgctagcaaggcagagcacaagcttatggcggcttatcaggcctgggcatgctcgttgacccacgggcgtaccctcctacacttatcggccacgacgccaaaaggaatagtccgatgaaagctgtgctgtgcaaagccttcggccctgccgaaaccctggtgctggaagatgtcgcaagccctgcgatcaagaagaacgaaatcctgctggacgtgcacgcggccggggtcaactttccggatacgctgatcattgagggcaagtaccagttcaagccgccctttccgttctcgccgggtggcgaagcggctggcgtggtcagtgaagtgggcgaaaaagtcggccacctgaaagtcggtgaccgagtcatggcgctgaccggctggggcagctttgccgaacaggtcgcggtgccgggctataacgtactgccgatcccgccgagcatggatttcaacaccgccgccgcgttcagcatgacttacggcacgtcgatgcacgcgctcaagcaacgggccaacctgcaagccggcgaaaccctgctggtgctcggcgcttccggtggcgtgggcctggctgccgtggaaatcggcaaggccatgggcgcgcgcgtgatcgccgccgccagcagcgccgacaaactcgcggtggccaaggccgccggcgccgatgagttgatcaactacagcgaaaccagcctgaaagacgagatcaagcgcctcacggacggcaatggtgccgatgtgatctacgacccggtgggcggcgacctgtttgaccaggccatccgcgccatcgcctggaacggccgcttgttggtggtggggtttgccagcgggcgcataccggagttgccggtgaacctggcgctgctcaagggcgcggcggtggtcggggtgttctggggttcgtttgcccagcgccagccgcaggataatgcggcgaacttccagcagttgttcacttggtacggtgaaggcaagctcaagccgctggtgtcgcaggtgtatccgttggaacaggccgcccaggcgatcaatgaccttgggcagcgcaaggcggttggaaaggtcgtcgtccaaacccgctaaaaatttgaaataccgtcaatgtgggagggggcttgcccccgatagcggtgtgtcagtcacagctatacagactgataaacagctatcgggggcaagccccctcccacttttcgatctccggtgttcgtaagggaacattcattagcgttcatttctggttgtttatagataagaggcgatgctattttcggtaacgaaactgtaacattcgcatccgcagtcaaaacaagaaatctggagctcttgaatgtttgctttctttcgtcctgccgcacatcaggcgcccctgcctgaagaaaaaatagacagcacttaccgacgcctgcgctggcagatcttcgccggtattttcttcggttacgccggctactacctgctgcgcaaaaacttctccctggccatgccctacttgatcgacgagggttacacccgcggcgaactgggcctggcgatgtcggccatcgcgattgcctacggcctgtccaagttcctcatgggcctggtgtccgaccgctccaacccgcgctacttcctgcccttcggcctgctggtttccgccggggtgatgttcattttcggtttcgcaccctgggcgacgtccagcgtgaccatgatgttcattttgctgttcatcaacggctgggcccaaggcatgggctggccgccgagtgggcggaccatggtgcactggtggtcgcagaaggaacgcggcggcgtggtgtcggtgtggaacgtggcgcacaacgtcggcggcggcctgatcggcccgctgttcctgctgggcatggcctggttcaacgactggcatgcggcgttctacgtaccggctaccgtggcgttgctggtggcggcgtttgccttcatcaccatgcgcgacaccccgcaatcggtcggcctgccaccaattgagcagtacaagaacgactacccggaaggctacgacgccagccacgaagatgaattcagcgccaaggaaatcttcgtcaagtacgtgctgcgcaacaaaatgctgtggtacatcgccttcgccaacgtgtttgtctacctgctgcgttacggcgtactggactgggcaccgacctacctgaaagaagccaagcacttcacggtggataaatcgtcgtgggcgtacttcttctatgagtgggcgggtatcccgggcacgctgctgtgcggctggatgtcggacaagatcttccgtggcaaccgtggcctgaccggcatcgtgttcatggcgctggtgaccgtggcgaccctggtgtactggctcaatccgccgggcaacccgatgatcgacatgattgcgctgttctccatcggcttcctgatctacggcccggtgatgctgatcggcctgcaggcgctggaactggcaccgaagaaagccgccggcaccgctgctggcttcaccggcctgttcggttacctgggcggctcggtggcggccagtgcggccatgggctacaccgtcgaccatttcggctgggacggcggtttcgtgctgctgatcggcgcatgcctgctggcaatcgccttcctgatcccgacgctgtggcacaccaacagcgtcagttcggcgcgctaagcacctgagcaaccctttgcacaacgcttgagccgcgcctccaggttcttatctggcatggcgtggctgcgcagggcgttgacggtctgctcgacataatcgcgagtggtgccgtaacgcccgcaagcactttgcagcacatggttcagtacgatatcgggcaagttaccggcgtagctgggcaagtgccgctccaacacaaaccccagcgcctgtacggtactgccatcttccagacggcagctgagccagtgtggccggtaggacgggtaaggcatctcgcgctgccacagggcgtacagcgaggcttccagctgatcttccggcaaacggtaggcaaacccgctgcaggagcccccacgatccaggccaaagaccagccccggcagctccggcgtaccccgatgctcatgggaccacaggtacaggccccggtgataaccgtggacccgtgcccgcacccgctcggtcgaggagcattcagggcgccagatcagcgaaccataagcgaataaccagaccggcccacccttatgccgcgccatggtggcctgcatcgagctcatcaactgttcgtgagtgagttgcggcccaagatcgagccgcggagggtaagccaattgcaaaagatcggattcaataacggtcatggcaaatcgcttaggtctcctgtgctttaccagttgtaggcaactttaccgtaatagaacgcaccgctgtaaccgtacggcgaaaaagtgctataggccaaattgccaccgctgctggcgaaggcattgaccttctcagggtatttatcggtaacgttgtcgccacccagggtgaaggtccagttcttcaacttatagtccgccgacaaatccagcacccaggccgccttgaaggtctggtcgttgaccttgtctgcctggtagctggtgaattcaccatagcgcaccaggttgctgtgcagcgcccaattgccgaatgtgaagtcgttacccaggctcagtttgtgctcaggcgtggtgtcgcccagcaagccgctcttttcgcgacggtccacccgcaccaggttggcacccaggctatcgaggatggccgggttgggcttcacgtccgtcacccgggtatggttgtagttgtagcccacggtgctgttccagcggatgccgttatcgaattgatagcgatagttggccaccaggtcgacgccgtcggtgctggtgtcggtggcattggtgaagtagcgggcggtggtgtagttgatattgccgacaccgttggcgcgcagataggcctgggtggccgggtccagattgaggttggacgacaggctgatacggtcgcggatatcgatgcggtacacgtccacggttactgtcaggtcgtcggcaggctccagcactaggccaaggctatagttgcgcgacttctcggccttgaggtcttccgcgcccagcaggcgggccacctggctcgatgccgggaaagtgccggcctcgcggatgtcactgccgatcaactgcgacgaggtaaacgcaaagttctgctgcgccagggacggtgcgcggaaacctttggagatactgccgcgcaaggccacctgcggggtgaagtcgtaacgggccgacagcgaaccgctgacattggagccaaagtcactgtaatcctcatgccgcacggcggccgatgcgctgagtttttcggtgaagttggtttccaggtccaggtactgggcccagttgtggcgcgaactgctgccggcgtcggcatcacggaagccgccgaggcccgagctgccggtctggtagtaggacgccggttcacccgcttcaatctcatacccctggcgcaggtattcaccgccaaaggccacggagaccgggtatggcaggaagcccacgtcgaactcacgggacaggtcgaggctgacttgcttctggtcgttgctcagggtgccgttgtcgaacttgcgcggcgtggccaggcccagggaggtgttgatggtttcggtgctcaactcgtactggttcttgccgtagttggccgagaggtcgtagtgccagtcgtaggcaaacagcccgcgcaggcccaccaccagcgaggtgtcctccaggttgcccttgatcaacggcaggtagccgttggggttgagcgccgcaatgttgttggaagcgttgctcgcccggtagaacgccgccgtctcgccgcgccgcttgctgtagccgccgaaagtgtagaactcggcggcatcgttgaacgaatattccgagttgaactgcaacttgccttcattggtggccggttcgccctggcggaacacgcgctggccgtaggtggtggagccgacactggctgggcggtaatcattgccggcacggttggtgtaatcgttatcggcaccttcggccgagaggttgatgaagccgctatcacccaatgccaggccggtattgccgctgacattacgctggataccgtcgcccttcttgtattcgccgaacttggtagagatcgagccgccatggtcggcgtgcttgaggatcacgttgatcaccccagcaatggcgtccgagccgtagcgcgcggaagcgccatcgcgcagcacctcgatatggtctaccgccgacagcgggatcgcgttcaggtccgctggcgccgagccgcgtcccaccgcaccgcccaggttgacgaacgcgctggtatggcgacgcttgccgttgaccagcaccagcacctgatccggcgacaggccgcgcaactgcgcaggacgcaccagctcagcaccgtccaccaggctcgggcgcgggaagttgatcgatgggatcagccgcgccagcactgcgcctagctcatcggagccggtgctgcgcagggtgtcgccggaaatcacatcgatgggtgacagcgaagcactggccgtacgctcctgggcgcgggtgccggtgacgatcacggtgtcgagcttgggtgtatcggtggccgacgtttcggccgcgaagacaggattgaaacccacggcggccagcaaattggctgacaaaatcgccgtgtacagcgcgtgttgcttgtagctccccataccgctcccctttgaatcaaaaaccagaacgtcgtgctctgagttcttacgatcgatccgactggcgggcggtggcggtcagtgattagtggttgtgaaagagtcggtagtccgttgcgatatagcttaaggatatttatgtaacaaattaaatacctttaaagcataagtgattgcataagcaaactcgcccattcatcaggattgcgcgggccaatcccggtagtttcagccccggttcagcctgggaacgtgccaaaccgtcaaaatggcgcccaccttatgacccacctagccgagcatcaaaccgactatcgaggtcgcacccatgaaaaaattccgactgcctggcctgctgttcctggcccaggccaccaccgccctggcgggcgaaacaccggccaccgaggacgacaaaggtttctggtacgcgcagaccagcgtctacacccggcactttgcgccggacccggaccacaacaacaaccaggacctgatcggcctggagcgcaatgaagcctcaggctttgtgtatggcggggcgacgtttcgcaactcgttcagccagcgctcgtactacgcgtacgcgggtaaacgctacgacatggccgactatccggtgtatttgaaactgacgggcggggcgatccagggctatcgcggcaagtaccgcgacaagatcccgttgaaccgtttcggtgtggcgccggtgatcattccgtcggtgggcacgcattacgggccagtggcggcggaattggtgttgctggggttcaacgcagcgatggtgacgaccggcgtacgattttaagcacgcggcgcataggcaaacacgtcggcgcgcatctggtgcgcatccatgccggcttcgaccagcgcatccagggtgccatagatcattgccggcgagccgctggcgtagacgtgcaccgacttgaggtcggcaatgtcttcgcacaccgcttcatgcaacaacccgcagcgcccttcccaaccgcacaggtcgctgacgactttgtgcaaaaacaggttgggcagttgcaaccattggtcccagtgttcgatctcgtagaaatcttccgggcggcgcacgccccagtacaggtgcactgggtgcttgaagccggaggcgcggcaatgttcgatcaggctgtgcatctgcgccatgccggtgccggcggcgatcaacaccagcggcccgtccggcagctcggccaagtgggtgtcgccaaacggcagctcgacgcgagccatctggttgcgttgcagttgcgcaagcaaagtgcgggcactgtcctcgcgggccagcacatgcaactccagctcacgtccggcatgaggcgcagaagccagggagaatgcggatttctcgccgttctcccgctcgatcatcaggtactggccggcgtggtaacgcaccgccttgccggccggtgcacgcaggcgcacccgccacacgtcgccaccgacctctacgcattcactcaattggcacgacagtttgcgcaacggcaactctcccggcgccagcacgccatcccacaacacaacgcaatcttccagcggctcggcaatgcaggtgtagaactcaccgtgatcacgcacttcaccggcctgctgtacgcggccttccaccaacagcgcggcgcacacatggcacacgccgttgcggcaggcctgtgggcactcgtagcccaggcgacgcgcgccttcgaggattcgctcgccagggaccagttccagcacggcgccggaaggttgcagggttacacgcatcaatctattcccaattctttccagatcgcatcgacacgggcggtgacggcttcatccttgacgatcacccggccccactcgcgggtggtttcgcccggccatttgtgggtggcatccaggcccatcttcgaacccaggcccgacactggcgacgcgaagtcgaggtagtcgatcggcgtgttgtcgatcatcaccgtgtcgcgcttggggtccatgcgcgtggtgatggcccagatcacgtcgttccagtcgcgggcgttgatgtcgtcgtcggtgacaataacgaacttggtgtacatgaactgtcgcaaaaacgaccacacaccgagcattacccgcttggcatggcccgggtacgacttcttcatggtcacgatggccatgcggtacgagcagccttccggcggcaggtagaagtcggtgatctccgggaattgcttctgcaggatcggcacgaacacttcgttgagcgccacgccgagaatcgccggctcatcgggcggccggccggtgtaggtgctgtggtagatcggcttgatccgatgggtgatgcgctcgacggtgaagaccgggaagctgtcgacttcgttgtagtagccggtgtggtcgccgtaagggccttcatcggccatttcgcccggatgaatcacgccttcaaggatgatttcggcggtggccggcacttgcaggtcgttgccacggcatttcaccagctcggtgcggttaccgcgcagcagaccggcgaaggcgtattcggacaggctgtcgggcactggggtcacggcaccgaggatggtggcggggtcggcgcccagggccacggagaccgggaacggtttgccggggtgcttttcgcaccactcacggaagtccagcgcgccgccacggtggctcagccaacgcatgatgaccttgttgcggccgatcacttgctggcgatagataccgaggttctggcggtccttgttcgggcctttggtgacggtcaggccccaggtgatcagcgggcccacgtcaccgggccagcaggtctgcaccggcagcatggcgagatcgacgtcatcgccttcgatgaccacttcctggcacaccgcgtccttgaccactttgggtgccatggcaatgatcttgcggaagatcggcagcttcgaccaggcatccttcagccccttgggcggctcaggctccttgaggaaggccagcagcttgccgatctcgcgcaattcgctgaccgactcggcacccatgccaaaggccacgcgttcgggcgttccgaacaggttgccgagcaccgggatatcgaagccggtcgggttctcgaacagcagcgccgggcccttgttgcgcagggtacgatcgcaaatctcagtcatttccagcaccggggaaatcggcatctggatacgtttcaactctccgcgctgctcaagttgctgcacgaaatcccgaagatccttgaatttcattaaccatgccacccgtaaaataggcgtacatcctacctgctccagggtgcgtttgcctgccagcagcgcttaaaaaacgggcacaaaaaaatggcgcccctgggggcgccattcttcaggacctgaaacgtcgtattacttacgcttcatcgacaggaagaactcgtcgttggtcttggtggttttcagcttgtcgaccaggaactcgatggcggctacttcgtccatcgggtgcagcagcttgcgcaggatccacatgcgctgcagctcgtcgtcagcggtcagcaactcttcgcggcgggtgccggaacggttgatgttgatcgccgggaacacgcgtttttccgcgatgcgacggtccaggggcagttccatgttgccggtacccttgaactcttcgtagatcacttcatccatcttcgaaccggtttcaaccagtgcggtggcgataatggtcagcgagccgccttcttcgatgttgcgcgcggcgccgaagaaacgtttcggtttctccagggcgtgggcatcgacaccaccggtcaataccttgccggagctcgggatcacggtgttgtaggcacgggccagacgggtgatggagtcgagcaggatcaccacgtccttcttgtgttcgaccaggcgcttggccttctcgatcaccatttcggcaacctgcacgtggcgggttggcggctcatcgaacgtcgaggcaaccacttcgccgcgcacggtgcgctgcatttcggttacttcttccggacgttcatcgatcagcagcacgatcaggtgaacttcaggattgttacgcgcgatgttcgctgcaatgttctgcagcatgatggtcttgccggctttcggcggcgcgacgatcaggccacgctggcctttgccgatcggggcgcacaggtcgatcacacgaccggtcaaatcttctgtggaaccgttaccggcttccatcttcatgcgcacggtcgggaacagcggggtcaggttctcgaagagaatcttgtttttcgcgttctcgggacggtcgaagttgatcgtgtcgaccttgagcagggcgaaataacgctcgccttccttcggtgggcggatcttgccaacgatggtgtcaccggtgcgcaagttgaagcgacggatctggctcggcgagacgtagatatcgtctgggccggcgagataggacgcgtcagcagagcggaggaagccgaagccgtcctggagaatctccagcacgccatcaccggagatttcctcgccgcttttcgcgtgcttcttgagcagggagaaaatcacgtcctgcttgcgcgaacgggccatattttctatgcccatttcttcggccaattggagcaggtcggtaatcggcttttgcttgagttcagtcagattcatataggaatgacgtaatcatttatggaggggggaaattaagcttttggcttaatgaggccgcgccgcagagaaggcgacaggatcgcgtactaatcgaaaaggaatgcgtcggcgacggcttgcagggggcagtggagaaaccagtgcggggccgaatgtaccacctgagtttcggagcgtctagccctgtttcacgaaaaagccccgctatttgcggggcttttttgacgacgcttagatgttcgcgtcgaggaaagcttgcagctgagacttcgacagcgcgcctactttggtcgcttcgacgttgccgttcttgaacagcatcagggtcgggataccacgcacgccatgcttggcaggggtttcctggttatcgtcgatgttcaacttggcaatggtcagcttgccttcgtaggtagtcgcaatgtcgtccaggactggagcgatcattttgcaagggccgcaccattcagcccagtagtcaaccagcaccgggccttgagccttgagtacttcggcctcaaaggtcgcgtcggtgacgtgcttgataagatcgttgctcatggatgtctccggattgtaagcaaaaaaaacgtggcccatcatagctgcccttcccccgttcaggaagccgcctctgattgagtcttcctatgatggcccatgagtttgggtatcgcccaactcagggcgtgacgggggtcacgaaggcaataccggtgcgcaacgccgcattgcgcacgtgttcctgcatggttttctgcgccgccgcgctggcgcgtcgggccagggcgcgcactatccggcggtgctcctgccaggtttccatggcccgttccggtcggatgaacggtagcttctggctctccagaaaaacctcggcactcgcgctcaggatgctcaccatcgcctggttgccactggcgagcaggatgcgctggtgaaattcgaagtcgagccgggcggcggcttcgaagtcgccggccttgaggaccttgcgcatggcctcgacattgtcttccaggctgtccaactcatcgatggtcagcgtcaccgccgccagccccgccgcaaaaccttccagggcatagcgcaactggaagatatccagtggcgtggcctgcgcagcgaagggccaggcaaaccccggcgcctcctcggcggtctgcacgaacacgcccttgcccggctgcacactgaccacacccaacgcgctgagggatgacaacgcctcgcgcaacgacgcccggctcacccccaactgcaccgccagatcccgttgcgacggcaacgcatcgcccggtccgaagccttgctccttgatcagtttgcgaatggcctgcagggccgcttccggtacggcttgggcgatggaattcataaaaaactcaaggttccagtcaactgagtggctagttgtaaagctattcgtggcgggcggcaagccacgccccaaaggggctcgcgaggttttgccgacgctcgaaaacagtgcgcaaagcccctgcactgttcagaccagtccgaccaccaaaactcaataaatactggccctgcagacgattcagaaggtgatggcatgcgctgtgcactgggcaaatccagaaaatcccttcgcccttctcggagagttgccatgaccaagcgctacagcgccctgcttactgccctgtttgccagcctgatgctgagccaggcacccgcccaggccaatggtctggacgacatcgtcgcccgtggcaccctcaaggtcgccgtaccccaggacttcccgcccttcggctcggtcggccccgacatgaagccacgcggcctggacatcgacaccgccaagctgctggccgaccagctcaaggtcaagctggaactgaccccggtcaacagcaccaaccgtatcccgttcctcaccaccggcaaagtcgacctggtgatctccagcctgggcaagaaccctgagcgggaaaaagtcatcgacttctccaaggcctacgcaccgttctacctggccgtgttcggcccgcctgacgccgccatcagcagcaccgacgacctcaagggcaaaaccatcagcgtgacccgtggcgccatcgaagatatcgaactgaccgccgtcgcccccaaggaagccacgatcaagcgcttcgaagacaacaactcgaccatcgccgcctacctggccggccaggtcgacctgattgccagcggcaacgtggtaatggtggcgatcagcgaacgcaaccccaaacgcgtacccgcgctgaaggtgaagctcaaggactcgccggtgtacgtaggcgtgaacaagaacgagccggccctgctggagaaggtcaaccagatcctgatcgcggccaaggccgatggcagcctggaaaagaacgctatgcaatggctgaaagagccactgcccgccgatctctgaaagcggagctgacccatggcgtatcaatttgactttgtgccggtgctggccaacaccgacctgctgctgcgcggcgcgctgttcaccctcgagctcacggccatcggcgccatcctcggcgtggccctgggcaccgtcggcgctgtggtgcgggcgtggaagatccagccgttcgcctggttcttcggcgtttatgtcgagttgatccgcaacacgccgttcctggtgcagttgttcttcatcttcttcggcctgccgtccctggggctgaagatcaccgagtggcaagccgccgtgctggcgatggtgatcaacctgggcgcgtactccacggaaatcatccgcgccggtatccaggccattccgcgcgggcaactggaagccgctgccgcgctggcgatgacgcgcttcgaagccttccgccacgtggtactgctgccggcgctgggcaaggtgtggccggccctgagcagccagatcatcatcgtgatgctcggctcggcggtgtgctcgcagatcgcgactgaggagctgagctttgccgccaactttatccagtcgcgcaacttccgtgcgttcgaaacctatgccctgaccaccctggtgtacctgtgcatggcgctgatgattcgccagttgctcaactggatcggccgccgcttcgtaatgaggaacagtcgatgagtgatttctcgttctgggacatcgtgcgcaacctggccaccggcctgcaatggacgttgctgctgtcactggtggcgtttgtcggcggcggcgtgatcggcttgctggtgatgacgatgcgcatcagccgcaacgccttcccgcgcaatgtcgcacgcacctatattgagctgttccagggcacgccgctgttgatgcagctgttcctggtgttcttcggcattgccctgctcggtgtggatatctcgccctggctggcggcggcgattgccctgaccctgtttaccagcgcctacctcgccgaaatctggcgtggctgtgtcgactccatcgcccacgggcaatgggaagcgtcggccagcctggcactcaacccgctggagcaactgcgctacgtgatcctgccccaggcactgcgcattgcggtggcaccgacggtgggcttctcggtgcaggtggtcaaaggcaccgccgtgacctcgatcatcggcttcaccgaactgaccaagaccggcggcatgctcgccaacgccacgttcgaacccttcatggtctacggcctggtggcccttggttacttcttgctctgctaccccctgtccctcagtgcccgctacctggaaaggagactgcatgcctctgcttagaatttccgccctgcataagtattacggcgatcaccatgtgctcaagggcatcgacctgaccgtggatgaaggccaggtggtggcgatcatcggccgcagcggctcgggcaaatccacgttgctgcgcacgctcaacggcctggaatccatcaacgacggcgtgatcgaggtcgatggcgaatacctcgacgccgcccgtgcggacctgcgcagcctgcggcagaaagtcggcatggtgttccagcagttcaacctgttcccgcacctgacggtcggcgagaacgtcatgctcgcgccacaagtggtgcagaaagtacccaaggccaaggcagcccaactggccaaacagatgctggaacgcgtcgggcttggcgagaagttcgacgccttccccgatcgcctgtccggcgggcaacaacagcgtgtggcgattgcccgcgccctggcaatgtcgcccaaggtgctgctgtgcgatgaaatcacttcagcgctggacccggaactggtcaatgaagtgctcagcgtggtgcgccaattggccaaggacggcatgaccctgatcatggtgactcacgagatgcgcttcgcccgggaagtcggcgacaagctggtgttcatgcaccagggcaaggtgcatgaagtgggcgacccgaaggtgctgttcgccaacccgcaaaccgccgagctggccaacttcatcggttctacggaacagccgaactgaccagctcgaattgaccacgcccctccagcagcatctcccgacgtactgagagggcatcggccggcaattgaaccgctatctccaccagggccgtcagccgacggcccgtcaccggcgcatcgcctgctgtcgcatacaacgcccgccccggtaacagctgcccaccagaggcttcatcgggctgccacgacaccggcctgccgtcgacctgagcctgcctcaggttcaaggtgaaacgcccttgccgcccgaattgaaagccttgtgcatcggcggcgacaccgctgaaacgcagcgccattgccgcaggatccgcgcaaagcacgctcaggtgcagcgtacgcggcgtgtcgagcgtcattgtcgccctgccggaggacgcttgcgaagggcgaatcaccccgtagtcgacccggtgctcgctcaaggtcatccggcagttttcagcctgcgcctggctcgccacaagggccacccacaacagccacagacttcggcgtttagcgagcatggcagaccaccggcgcggtttcatagaattggtcatcgtcaggctcttgctccggattgacttgcagcagacaggattgcgaattcggtaatgaaaccttcaaggttttcagcccatcgatgttgctgaggaaaatcatgccctcacccaccacactggtcacaaaactgttgtcctgcccgaacaccgccgccccttgaggcaagggccgaccctgttcgtcctgggcttcgagcaatagacgacgcactttcaccacatcaaagttgagaatattgactgacccacgaccggcagcgagcactttggtcccgttcttcaagtcgacgcgtttgggcagcgactgggtctgaacctgcagatggttgttgctgtaggcctgcagaccggggatcactgcctgaccgctgaaatcggtccataccggcccttggggcgtcgagaccttggccgctccgatatctcccaccgacacaatgccaaaggtgtcctgcacggcatacggcgagaaggtcacgccgtgctcatgggccacgatgccgccttgcagttggccggaatagttggtgttcgacgggtcacggctgacgcccaggctcacgcgggtatacagcggcaagacatccacacgaccacgcacgctttgctcccgttctttcacgtcccgatcaacaccgacttcatagttcacatagtcgttgacccgctcactgagcgcggtaccggcatccagccggtcacctcgacgactgacgtaagtgctcatgcgccgatcattgccgaggggcatcgtgacctgcagcctgacagacgtaccctcgtccagccgctcgtcgcggcggccacctcgaattgggtccgggcgccgaggggcggtcgcaccgacctgagcgtcggcgatgagtgcgacacccacgccattgaaggtgtcgttccatgaggcaaagaggtgatcgttggattgcccgtcaaactgcgagttacgggtgaaaccgagggagaaaccacccagggacggcgccgcccagctcaaacctgccgtgtactggcgtttgaaacgcgcatcgaggttatacccccgcgacgcctgaccggcgtccagtacctcccggtagccgcggctctgcgtcgaggcgctcaggttgatatcaaggttggcgaataatggagtccccaaagacagcgtgctacgtgcaccgcccacctcatcttgagcatcacgggacacgttatggcgcacgcccacggtcacccgatggaaaaacacactgctcagggccccccctgccgactggtactcatcggtacccagcaaaccgaaacccagcgacgaatgcggactaagcccccaagtgccgctgcccatggcgaccacgggcgactcccgactttcggtagacgtttcacgcaccttaccgagggaaaagtagtagcccggcgcaaccggaaccccaccacgaaaggaagcagcaggcaccacgaaactgcgctttgccccacgcacgtcgatcacgctcacatcgaggtcgctggtactgttcagcaacggtaaaccggtcagcctgaacgggccttccggcaccagggtggagtgaatcaatgcgcccgactgacggacttcgacccgcgactgactttgcgccagcccttcgactaccacgttgctgtcgcccgcgccggtacgctgctggccatccggggagaactgcaagccggtcagctgtaccccgccaaagatcgggttgttgctggaaatctgtcccacctggaaggtcgactgcaacgccgcgatgtcacgctgggcataggcattcacgtgttcggtgcgcgtcttgccattgtcggaaacataaaactggcgactgcgaacaatccagttccccaggttgaatcccgcctccgtataggccgatacgaagcgacttggcccactgcgcgagtgggtatcgaaacccaatacgtcgtagttgaagatggcggccgcgccaccctcggaaaaattaccgccctcccattccggtgctcgcagggactgggtcggcaccaccagggtgacctcatcgctgctggggcgcagccgcaccatggtcgctgggtattctccaacaaaatcatggcatgcctgatcgggagtaacgccctcgctcagaagcctggacggggtgatcagaccggcctttgccagtaacgccggggtgaagcacaactgaccctggtaatcgaaacgggcgtcaaccaatcccagcggcgtgccattgactcgcagtccgactatatggacaccttcgcgaaagcgcgctgcgctgcgaaagtattcagacacctgtggatcaatcccgagggagttcaatgcgaccaggtcaaagccttcccccagcccaaccgctgcgctcgtgcctggcagactccacagcgtcgcgagccccaataaaaacctggagcgcgcctgggcggaaccactgcacggtacccgtttggcggggcgacctgattgccggatctttttcataggcccgtcaatccgcttctgccgtgacgggcgtgcggtaactgtccaccgtaaacccatacaccgtggccgggtgaatctccaccgccaccactcccgccaccgagcctgccgacgcgagcgtcagcacttcgcccggcaggatgtaggttcgcggcaacgttgctacgcttgcctgcggatgcagctgtacttccatccccaggcggacgacgtaagcgctgttgttgtggaccctcaactgatcccctttacgttcccatgtcagcaactgccagggcgcgtcatgcctgggtaagcctttggggtgcaggatcaatggcaggctctggcgcaaggtgataccaatggtcgcagcgccgggcgcacgtgcctcagggataccttcaaaggaaacgcgtttcaggcgctgggtcttgagcggctgcttggcggtactgatgaagcgaacaagttgtgtctcgcccgcttcaacccgagtaatcgggggcgtcacgatcaacaagtgttcgaggtcttcgggtatgttttgtatgactgaatgaagcaaggcagggccaggatccgtgtttttaatattaagcgttgcctcgccttcttcttcattcagaataacaacggttgtttcgggctgcatgccgtcggctacggccatgccgcacaaaaaaagggacacgcttatatatcgcaacagcgacataacggttattgataaaacattcaccgattttccccacagccaaaaagtcgaacatcaacaattgcacacattaaaactgccgacatttagcggagacacgaaagtatcttcagcttaatgtcggctgttaaaggcgtagttagatgtaatccactgacagactggtgcgaccgtccagcgttacatcgcgggtcaggtccaaatcgttcgtgcggttgataacggctttcacttcaagcatgccagtcagactggtgatgaatgcaggcaccgcagtggtaccactacgccacgaatactgggcaggcgattgggcgaccttgccgtcactgcttccccacgccgccccctgactgctgcgcatgatggggttcagggccccgctggacgattgcaggtttttgagagtaacggagtacccaccggtacgcttgccattggcgatacccaggccgtagttttgagcctcggtgaacccagcaccgaggatgcctggcaccttgctcgcggattgcaggtcactcagcgctactcgaaactgcgcgggcgtttggccgcaactgatgttcaagttgaccgtttttggtgcaagagaagtgaactgcgtcggggacaggcttgcggctggaattgtctggtaatcgacgatgccgccgccggtgaggctaaggttgcaggccaccggtttgatagtccctcgtacaatcagttcagccacattcgttgcatgagccccgatactcgcggccaggcaaagaacacccactgtcataccaagcatttttttcatagttaacctgtcatctgtaatcagcaggtgaatttacgatgataagaattctgaccatacataaataacaccacggcgaaattgccggatgacagtctgtcgttttggcgcccgattaaagaatcagatggggcgccagttgttgtgggaaccgtaaaaacaaacagtgagccatatcaaaacaccgagtaggcacaaatacataaccaataaattattaaccgcccccttgtaggcaaaatcataaacagcatgatgacaataaaaagttaaagactcctacaaagataaaaccgctttcgttgagagccctgaaaaccgccttacatttcccacaagaattcctcacagacacccgcaggaaaattaccggcgcactacgcgttggctccagcggtcgatcgtggcacgatggtcaggttatcgaccgagaccccaaaccatgccgcaatcccaagccaagaatctgtccctgatcgccgccatcgacctgggctccaacagctttcacatggtcgtggccaaggcccagaacggcgaaatccgcatccttgagcggctcggagagaaagtgcaactggctgccgggatcgacgacgagcgccagctcaatgaagaatccatgcaacgcgggctcgattgcctgaagcggtttgcgcaactgatcaacggcatgccgctgggcgccgttcgaatcgtcggcaccaacgcgttgcgtgaagcgcgcaaccgtggcgaattcatccgccgcgccgaggagatcctcgggcacccggtagaagtcatctccggccgtgaagaagcccgtcttatctatctgggcgtgtcccacaccctggccgacaccccgggcaaacgcctggtcgccgacattggcgggggcagtaccgaattcatcattgggcaaagattcgagccattgttgcgcgaaagcctgcagatgggctgcgtcagcttcacccagcgctacttcaaagacggcaagatcaccccggcgcgctacgcccaggcctacacggcggcgcggctggaaatcatgagcatcgagcacgccctgcatcgcctgacctgggatgaagccatcggctcgtccggcaccatccgcgccatcggcctggcgctgaaagccggcggccatggcaccggcgaggtcaacgccgaaggcctggcatggctcaagcgcaagctgttcaagctgggggatgccgagaaaatcgacttcgacggtatcaagcctgatcgtcgcgcgatcttcccggccggtctggcgattctcgaagcgatcttcgatgctcttgaactgcaacgcatggaccactgcgacggcgccctgcgtgaaggcgtgctctacgacctgctgggtcgccatcaccacgaagacgtgcgtgagcgcacgctcacttcgttgatggagcgttaccacgtcgacctggaacaagccgcccgcgtcgagcgtaaagccctgcacgccttcgaccaggtggccgaagactgggacctggaagacggcgtctggcgcgaactgctgggctgggccgcgaaggtgcatgaagtgggcctggacatcgcccactaccattaccacaagcacggcgcctacctgatcgagcactcggacctggccggtttctcccgtgaagaccagcaaatgctcgccctgctggtgcgcggccatcgccgtaacatccccaaggacaaatttgctgaattcggcgacgaaggcatcaagctgatccgcctgtgcgtgctgctgcgctttgcgatcctgttccaccacatccgtggcacccaggaaatgccccaggtgacgctgcgtgccgacggcgacagcctggacgtggtgttcccgaaaggctggctggatgagaaccaactgacccaggcggattttggccaggaagcggagtggttgacgcgagtggggttcagcctgaacctgcgttgacctgacctgaagaacgctgcaaaacaaatgtgggagggggcttgcccccgatggcggtggaccagtcaatgaatctgttgactgacactccgtcatcgggggcaagccccctcccacattttcagaccgcgtcggtttttaattcaccgacagaatcgggctacccaacttctccaacaacgtcgcctgcgcactgcgcgggttctggttgccggtcggcgtgttgcgcacgtagcgaccgtccgactgcaggctccagctgtgggtgttgtcggtgaggtagctttccagctccttcttgacccgcatgatcaacttcttgccttcgaccgggaagcaggtctctacacgcttatcgaggttgcgctccatccagtcggcgctggagaggaacatctgctcttcgccgccgttgaggaagtagaacacccgcgtgtgctccaagaagcggccgatgatcgagcgcacatgaatgttgtgcgaaaccccgacaatgccagggcgcaggcagcacatgccgcgcaccactaggtcaatgcgtacgccggactggctggccttgtacagcgcgcggatgatcttcggatcggtcagcgagttgaacttggcgatgatgtgcgccggcttgccgtcgagggcgaactgggtttcgcgggcaatcatgtcgagcatgcccttcttgagcgtgaacggcgcgtgcagcagcttcttcatgcgcaaggtcttgcccatgccgatcaactggctgaacaatttgccgacgtcttcacacaaggcgtcgtcggaggtcagcaagctgtagtcggtgtagagcttggcgttgccagcgtggtagttgccggtgcccaagtgggcgtaacgcacgatctcaccggcttcacggcgcaggatcagcatcatcttggcgtgggtcttgaagccgaccacgccgtagatcaccaccgcaccggctgcttgcaggcggctggccagttgcaggttggactcttcgtcgaaccgcgcacgcaactcgatcaccgcggtgacttccttgccgttacgcgcggcgtcaaccaaggcatcgacgatttccgagttggcaccggaacggtacagggtctggcgtacagccaacacatgcgggtccttggcggcctggcgcagcaggtcgaccacgggcgtgaaggactcgaacgggtgcagcagcaggatgtcctgcttgctcaccacgctgaagatgttctcgctgttttgcagcagtttcgggatctgcggggtgaacggcgtgtattgcagctccggatggctgtccaggccggtgatgctgaacaggcgcgtcaggttcaccgggccattgacttgatacagctcggtctcgcccaggttgaactgcttgagcaggtagtccgacagatgtttcgggcaggtgtcggccacctcaaggcgcaccgcatcgccgtagcgtcgcgagaacagctcgccgcgcagggcacgggccaagtcttcgacatcttcggagtccagcgccaggtcggcgttacgggtcaggcggaactggtagcagccttttaccttcatgccctggaacaggtcatcggcatgggcatggatcatcgacgacaggaatacatagttatcaccagcgccccccacctcttccggtaccttgatgatccgtggcaacagacgcggcgccgggatgatcgcaaggcccgagtcgcggccaaaggcgtcgataccttccagctccacgatgaagttgaggctcttgttcaccagcaacggaaacgggtgcgtcgggtccaggccgatcggtgtgatgatcggcgcgatctcgtcgcggaagtaacgacgcacccaggtcttgatcttggtggtccagtgacggcggcggatgaagcggacctgatgtttttccagctccggcagcaggatgtcgttgaggatcgcatactggcggtccacatggccgtgcaccagctcgctgatgcgcgccagtgcctggtgcggctgcaggccgtcggcgccggcctgttcacgggcgaaggtgatctgcttcttgaggccggcaacacggatctcgaagaactcatccaggttgctggagaagatcaacaggaacttgagccgctccagcagcgggtaggactcatccagcgcctgttccagcacgcgaatgttgaattgcagttgtgacagctcgcggtggatgtacaggctgctgtcatccaggttggtcaccgccgctaccggggccggcacgggcggttcggccaccacgacgggcgcggcgggctcatgctccggcggggtctcggtgacttgttcaaccaccgggtgagcgtcttttacggcaacttctgtgagtccttcggtattcatcgagtgttcctgtgagggctattgttgctctctaagcaattgggcggcgcgggcggcgaagtaggtcaggatgccatcagccccggcgcgtttaaaggctgtcagggattcaaggatcaccccttcactcagccatccattctgtattgcagccatgtgcatcgcgtattcgccactgacctgataaacaaaggtcggcaccttgaattcgtctttgacccgataaaggatgtccaggtacggcatccccggtttgaccatcaccatatcagcgccttcggccaggtcggccgccacttcgtgcagggcttcatggctgttggccgggtccatctggtacgaggccttgttggccttgcccaggttcagcgccgagcccaccgcatcgcggaacgggccgtaataggcgctggcgtatttggccgagtaggccatgatccttacgttgacgtggccggccagctccagggcttcgcgaatcgcctggatgcggccgtccatcatgtctgacggggcaaccacctgggcgccggctgccgcatgggacaaggcttgcttgaccagcgcatcgacggtgatgtcgttttgaacatagccgtcttcgtcaagaatgccatcctgcccgtgggtggtgaacgggtccaacgccacgtcggtgatcaccccaagctgcggaaaacgctcgcgcagggcacgggtagcacgctgggcgatcccgtccgggttccaggcttcggcagcatccagcgacttgagttcagacggcgtgaccgggaacagcgccaaggccggaatccccaattcaacccaacccgcggcctcttcaagcagcagatcaatgctcaaacgctccacgcccggcatcgaagccaccgcttcccgacggttttccccgtccagcacaaacaccggcaggatcagatcgtcggtcgtcagcacgttttcacgcaccagacggcgagaaaaatcatcacgacgattgcgacgcagacgggtggcggggaacaggcgattggcaggggtaaagctcacgacagactcctgagcccgggtttacgggcgagcgttgcagttataagcggccattatgacgaaggtatgacagttgtgcttaaggatgcgacctgtagtcgcattcggcatttctgtaggaattgttcacttcgtgacacatctcgatactttcatgaatcttcatgaaggcgtaggctgcgcgttcatttcgccagcaccccagaccatgcttcaacaattcctgcatgacttcggctactttgcgctcttcctgggcaccttctttgaaggcgagaccattctggttctcgcgggcttcctggcgttccgtggatacatggatatcaacctggtggtggtcgttgcctttttcggcagctacgccggcgatcagctttggtattacatgggccgcagacacggccgcaagctgttggcgcgcaagccacgctggcaattgatgggcgacaaggccctggagcacatccgcaagcacccggatatctgggtactgagctttcgcttcgtatacgggttgcgcaccgtcatgcccgtggcgatcggcctgtccggctacccgccgttgcgctacctgatcctcaacggcattggcgctgcgatctgggctttggctttgggcgctgcggcctatcacttcggcgcggtgctggaaggtatgttgggcagcatcaagaaatacgagctgtgggtattgggtgccttactgatactgggcttcggcctgtggctgcgccgccgcatcaagaatgcgcgcattgcccgtgaagcctgtgccgacgccaaggcccggctcgcggcagagccggtcccggtcgagccgcctaagacgccagtcgagtaagccggcttctgcagcagtagaggccaatcacactcagcaagctatagctcagcaggcccagccagcccaggttgctggccggccataacccgaccaacggtgccagccacaccagcggcacattcagcaccagccgcgaaagctcggccttccacgcccacggccggttctccagcgccactcctaaggtaaacaggcccagtgccatggcactccaacccaggatcagtgccgccgtgggcataccctcgccaaaattcatcagatagctgccaaagcccacatacgccgcaaattgcagggcgatatagacctgttgacgcacatccagcgacacgtcgaatttacggaactggctcaggtcatgcttgaccatcgggtacttggccttcacgtccgccgggcgccagccggtgcgcatgaaccagatgcgcagcttgtcccaccagcgctcggtgcgccgcgcatcactccacaactgggcatagaactgcaggttggcccacagcgggttccaactggccaacggtgtggtcacgccgaaaatcaccggttcgttgtcgtcttcctcctggaaggtgccgaacagccggtcccaaataatgaacacaccgccgtagttacgatccatgtagagagcgttctgcgcatggtgagcccgatgattggatggcgtgacaaaaaaccactcgtaccagccgagcttcggcacgtgccgggtgtgcacccagaattgatagagcaaattaagcgatgccacgctgataaataccaccaatggcacgccgagtacggccaggggcaggtagaaaatccagctcagcaggaagccggtactggtttggcgcaaggctgtgctgaggttgtagtcctcactctggtgatgcaccgagtgcgcggcccacaggatgttgcgttcatggcccatgcgatgcagccagtaatagcagaagtcgtagaacacgaaagcgaacacccaggtccagacgctctgggcaggcagttcgatgacggcgagatgcttgagggcgaacgcgtaggtcaaaatccccacgcctttggtcagcagccccgtggtggtggacagcaccccggtgctgaggctgttgatagcatccgccacccggtagttgcgctggccgcgccagcgatcggcgagcagctctaccacgatcaaggcgatgaaaaacggtaccgcgtaaggcacgaagtccatggtctggtccggtctatttttgttacatcaagattaggtgcagcggcgtgagatcccattggcaacagatgacaaattagtagacatttaacgccaagaccccaggagaaatgcccatgagcaaaaagattgcagtgatcctttccggctgcggcgtgtacgacggcgcagagatccacgaaagcgtgatcaccctgctgcgcctggaccagcgtggcgctcaggtccaatgctttgccccggatattgcgcaactgcatgtgatcaaccacctcaccggcgaagagatgcccgagtctcgcaacgtgctggtggagtcggcgcggatcgcccggggtgacgtgaaagatatccgcgaagccaacgccggcgacttcgatgcgctgatcgtgcccggtgggtttggcgcggcgaaaaacctctcgaactttgccgtggagggtgctggctgcagcgtcaacccgcaggtgctggaactggccgaagcctttgccgaagcgggcaagccggtggggctgatctgcatctcaccggccctggcggctaagatctacggccccggcgtgacctgcaccatcggcaactgcgccgacaccgctgccgcactggacaagatgggcgctacgcaccaggaatgcggggtggaagatatcgtcgaagacaaggcgcgcaaactggtgagcaccccggcctatatgctcggcaagaacatcagcgaagtcgcttcggggatcaacaaactggtggatcgggtgctggaactgactcacgagaacgactgatagcccccaactgtggcaaatcgccagttgtggtgagcgggcttgttgtggtgagcgggcttgccccgcgnnnnnnnnnnnnnnnnnnnnnnnnnnnnnnnnnnnnnnnnnnnnnnnnnnnnnnnnnnnnnnnnnnnnnnnnnnnnnnnnnnnnnncgcggggcaagcccgctcaccacaacaagcccgctcgccacaagaaaccggatcaccatagggtcaagccggacgcatcaactttgtgagaatgcggtccagcgcattggcaaacgcctgcttttccttctccccatggggcggtggcccgccgcccatctggccttgctcacgcagatcagtgaacagattgcgcacggccaaccgttcactcatgttcgccgggctgaactccttgccgcggggatcaagcgccgtgacgcccttcttcaccaggcggtcggccagcggcacatcgctgcagatcaccagctccccgggcaccgcgtgctccaccaggtagtcatccgccgcatccgggccgctgggcaccacaatcagcttcacacacgagaagctcggcttgatctgactctgaccggccaccagcaccacctcgaactggcgcttgagggcgaacctcaccacctggtccttggctgccctaggacaggcgtcggcatcgatccacacccgcatgctcaggcaaccacccggcgcttttcggccaggcggctgcggccatacagcaccacaatcgccaggatcgccaccgcctgtgcactcaacgagtacgcatcggcgtggatacccagccagtcaaagtcaaagaacgccaccggccgggtgccgaagatgccggcttcctgcagcgccttcacgccatgcccggcaaacaccaccgacagcgcacacagcaacgccgcgttgatgccgaagaacaacgccagcggcagcttcgccgaaccccgcagaatcacccacgccaggcccaccaacagcaccagcgctgtggcgccccccgccagcaccgcgttgtgcccggccgggccggcttgcagccacagggtttcgtagaacaggatcacttcgaacagctcgcggtacaccgagaagaacgccagcaccgcaaaaccgaagcgcccaccgccgcctaccaggctgctcttgatgtagtcctgccaggcggcggcgtggcggcggtcatgcatccacacgccgagccacagcaccatcacactggcaaacagcgctgtgcagccttcaagcaattcacgctgggcgccgctcacgtcgatcacatacgcggccaatgcccaggtcgccaggcccgccagcagcgccagaccccagccgacgttgacgctacgcaccgccgattgctggccggtattgcgcaggaacgcaaggatcgctgccagcaccaggatcgcttccagaccttcacgcagcaggatcagcaacccggagatgtagctcaacgaccagctcaagccatcaccgccgagcaggccggcggattcagtgagcttgcccttggcgacgtccaggcgttgctgcacctgttcaaccggcaaaccgtcctgcaacgactgccggtaggccatcaacgccttctcggtgtccttgcgcacgttggcgtcgacgttatccagcgagctttctaccagctcgaaaccttccaggtacgcagccacggacaggtcgtaggcctgctcatgatcacccttctggaacgccgccaggctcttgtccagggtggcagcggtgtagtcgagcaactgcgccgggccacgcttgacctgcggcggttgcgcacgctgggcgcggaacgtcgcggcggcggctgggccgttggcagccagcacttcattgggggtctggcgggccaggtcggcaaggttgaacggttgctcgctttttgcagccaccgggtcggcagtaaagccggcgatgtaggtggccaggtcccagcgctggcggtcgtccaactggtcggcgaaagacggcatgtcggtgccttcaacaccgaggcccagggtgttgtagatcgcgtagaggctcaggcgatccaggcgcacggcgtcacgcagattggccggtggtggcgtcatgcccacgctggccgggccgtcacccgcgccagcggtgccgtggcacaccgagcaatgctgggcatagagcggcgcgcctcgcgttggatcaggggtgatcgccggggcctgactgacttcataggccacggctagttgggcacctaactgacgggcttggcgggcgactgtcgtaccgtcctgatgggcggttacggctgctaacaattcgtcgacgcctttgaccagcgccacgcgttccgggcgctgcggcagctctgccaccagcccctgcaataccccgagaaactccagctgttcgcggtattcggattcatcgataaccttgcccgcctccaccgtcgctgggtagtcagcgccaatgtaatccagcaaatgcagggcttggggcgcgccctcggccgtcgcggccaacaggttgacgctgcacgacatcaacgccggcaatatcagccaggcgagaaaacgaaggggggcaatcatgaacgaatctcaaagggaaatacgaagtaacacattgttaagccttaaagggtttgactcaaggcgtaagtgatttgtcgttgtttgaggcgaggcattttcaggagcggactagtggcgcttttgtcgacttagtcgggcaaaaagccattgttttgccagcaatgacgcttataatgccgcgccctgttagtgcgaaagggaatttcattcctgttttttataaggaatgaccacatcagttgatactttcagggaagaagtctgcatggcatttcgcgccttaccttcgctcgcgctcgtggcggtgaccttgctgtccggttgttcgatgttccgcagctacgacacggaactgcaagccaccaaccagcaactggccaccggcaatgtcgatgcagccctgacactgctggaaaagaacaacaccggcgacgacaaggacttgctctatttcttcgagaagggcgagttgctgcgtgccaagggtgatttgaccggcagccagaccgcctggcgcagcgccgacctgcaagtctacaagtgggaagagtcggtcaagttcgacagcgcaaaatacctcgcccagttcggcagtttcctggccaacgacaaggtgcgtcgctacgaaggctatgactacgaaaaggtcatgctgaccacccagatggcgctgaacctgctggccctgaacgacttcgacggtgcgcgcaccgaaatcaagaagacccacgaacgcgaagcggtgatcgccgacctgcgcgacaaggaatacctcaagcgtgaggacgaagcccagcgcgaaggcgtaaccacccagatgaaagacctgcgcggctacccagtagaagccctcgacgcaccggaagtggtcggcctgaaaaacagctaccagagtgcgttcagccattacctggcgggcttcgtctatgaagcactgggcgaaaaagacctggccgcgcccggctatcgcaaggctgccgaattacgccccaataccccgctgctggaacaggccctgctggacctggacaaatccagggtcggcgccgatgaaaccgacgtgctgatcgtggtgcaaagcggcctggcaccggcccgcgactcgattcgtctgccgctgccgatcccgatcaatggcaacctggtgatcaccccgctgtcgttcccggtgatcaaggcagatacatccaccgccacgtttgcccagatcggcgtcgacggccagcaacagaacctcaccgcactcaacagcaccacggccatgtctcgccgcgccctgcgcgatgacatgccagggatcatcctgcgcaccaccgtgcgggcggtcacccgtggcgtggcgcagaacaacctgaacaagaccaacccgatggccggcctggtgctgggtattgcttcggccgtcaccgaaggtgccgacacccgcacctggcgcaccctgccggacatgacccaggtgacccgcctgcgcctcaagcacggcgagcaccaggtcagcctgcccaacgccctgggtggcacgctggtgacggtcaaggccgaccagcgctatcaggtgatcaccctgcgcgtggtcggcaaccaggtattcgccggtggcctggccgcccatgtggtgccgagcaccgccgcccaggccatcgccctcaaacaaccttaaggagcacgctatgcgtcatttcatcctcggcgccctggcgctagtcctgctggccggctgcgccaccccgccaccgccggaacccggcagcgccgcgagcaaaatcgtggtgatgggcaagttcaagggcatcgccgtcggcgccatccgtgtggcccgcgagaacggcttcctgaccgccaaggtgcagttgagcaacatcaccagcagcaaccagatgatgtactaccgctttgcctggctgggtgccgatggcttcccggtgggcgatgaagaaacctggaaagtgctgaacctgtacgccaaccaggcgaccttcctgccggcgattgccaatttgccgcaggcggcggacttccgtcttgaagtgaaaaccccttgagccgtccttctttgctgctgagagatttccccatgtttgcacgcttctcgatccttgccgtcgtcgccatcctggccagcggttgctccaacacttcgccggtactgggcggtaagaacatcagctacggcgataccaaggccgtggaactggtgaccaacgagttcggctccaccgacctgcagatgatcgccgaaagcatgacccgctccctggcccagtccggcatcctgcaaggccgcccggtggtgcaggtgtatgacgtgaagaacaagaccagcgagtacatcgatacccgcgagatcaccacgtcgatcaagacccagctgatgaagaccggcaccgcacgcttcgccagcgacaacaccgacatgcagagccaggtcgaccagctcaagctgcagaaccagagcggcctgtacaagaagtccaccgtcagcaagaccggcaacatggtcgccgccaagtaccgcctggaaggctccatcagctccatcgtcaagcgcagctcggactacaaggacgtgttctacaaattcagcctgcaactgatcgacgtcgagagcggcctggccgaatggatggacgaaaaagaaatccgcaagaccacggagcgctaagcaatgcgtgcatggatcggcatgatcggcctgctgtgcgccttcggcgcctcggccgccccgaagatcgcggtgactgacctggcctacgaggcgcgggtcgaggaatacattcaccaggtgtcggcaagcaacaacttccaggccagcgcctaccacgccagcggtacgtcgaactacagcgagtacgaaagccgcaccagctacatcgaacagaccgagctgcgtaaattcagcggggatatcaagggcgagatcctcaagtcccaccagttccagctggtacagggcacgccctacaccgccgatgccaagggtgacgtctacgacgtgatcaagcgcatcaaggccggccacttcaagggtgcggactatgtgctgtttggcacgctgtcggatatcgacttcacccaggacatcaacgccctggaccagaccaacagctactcggcggtgctgggcctgacgctggtggcggatttcagcctgatcaatacacgcacctacgagatcacctcggcgttcaccgccatgggtgaaggtcaggacaccaagttggtgaacaaccgcgatgtacgcgtcagcctgaaccggccgcgggtggtgaaggaagtgtcgaaagcgctgggtgaagatgtagcgcggcagttggcagagcaactgggtggtgggtatcaagacccgggcaagcctgcgttgcgcaataacctgccaagggatgaagcgccgaaaattttgcgctgacgccctattcacaaacaccgcaaaactattgtgggagggggcttgcccccgatagcggtgggtcaactacaagttagctgactgacacaccgccatcgggggcaagccccctcccccattttttaatccggttgtgtcagttatgccgtggcacggtgcaggctggcgaggaagcccgcagccccaacgaacaaccccgcaaacgtacgattcatccgcttctgctgcttaggcgtacgcaacagacgcaacaccttcgacgccagccccgtataccccgccatcaccaccatatcgacacagatcatcgtcgcacccaggatcaggtactggatcagcagcggcgcctgcgggttcacgaactgcggcagcaccgccagcatgaacaccagggccttggggttgctggcgttgaccaggaagccacggaacatcatcgccatcggcttgccgatcgggcgcacggccgcgtcatcggtcatgtccatgggcaaggcacgccattgcttgatggccaggtacaccaggtacgccacgccaaaccatttgatcgcatagaacgccgtggacgacgtcgccagaatggcacccaggccgcacgcgaccacggcaatctgcattgccaggcccagttgcaggccgatggcattccagtaaccgcgcaggaaaccgtattgcaggccgctggacatcgaggcgatggcgccagcgccaggggaaagggagatgatccaactggccaggaaaaaggccagccacgtatcgagtgccattacacacctcaggagggagtttgctgttgtgccttaagctaactccgccgaccaaaggatggctatagatttttacaggatgtgaatgctagcggtcgcccggaaagacatgggtacccggccaacggcgcaccgagcgctggaagaacaggctgttaggcacctgcaccatcgcgctgtcggtaccggcctcggccacttcgaccagcgtggtgtagagcaggttgatcgccacgacccggcccttcacgcccggtttgtcgacggtgtccaccagttcgacgatatcacccaggcggaacggcccgacggtgaagatcagaatggcgcagagcaggttggacaacaccgaccacatggcgaagaacgccaccgcggcgaccgcaacaaaccccgacagcgccgtccacaacaccgtggcggacacgcccaggcgccccagcacaaagatcagcgcactgcccatgatcaaccagcgcaagccgccacgcagcggcatcagcagttgcggtgggaacgggtagcgctcgcccaggcgagtcaggcctttggcgacaaagcgctgggcgaggtagccggccagcaggatcagcaggatttgcacgccgacccatacgggttcgacccactgcgtcgggatcggcagttgcaacgcttccatcaggacagcgcctccagctgcgcttgcagggtttccagcagttcgagggcttccatccaggtttcctccaattgcccttcgcgtaccttgagcttggcctgctcagccagcaggtcgcgcaattcatccttgcgggccgcctcgtagacggcgctgtcgcccaggctggcttcgatcttggccaggcgctcgtgcaccttgcccagctcggcttccagcttgtcggcttcacgcttgtgcggcgccaactgctgacgcaatgcggcggcagcctggcgctgggctttcttgtcggtcttgtccgggttgaccggggtgttgctgaccggcgcgttgcgcaggcggtaatccgtcagccagcgcgcgtagtcatccaggtcgccgtcgaactcttcgactttaccgtcagccaccagcaggaagttatccgtggtgctcttgagcaaatggcgatcgtgagataccaccaataccgcaccactgaattcctgcaaggccatggtcaacgccagacgcatttccaggtcgaggtggttggtcggttcgtcgagcagcagcaggttcggacggtcccaggcgatcaacgccagggccaggcgggctttttcgccgccggagaagttcagcaccggctcgtcgatacgcgcgccacggaagtcgaaaccaccgaggaagtcgcgcagggtctgttcgcgctcggtcggcgccaggcgctgcaggtgcagcaacgggctggccttggagtccagcgagtccagctgatgctgggcgaagtaacccaccaccgtgttctcgccacgggtcaggcgcccagccagtggcgacagctcgcccgacaggttcttgatcagcgtcgacttgcccgcgccgttggggccgagcaagccgatacgtgcacccggcgttagctgcagcttcactttttccaggatggtcttgtcgccatagcccaggcgcgcatcggaaagatccagcaacgggctggagatcttcaccgactcacggaacacgaaatcgaacggtgagtcgacgtgggccgccgacagctcttccatgcgctcaagggccttgatccggctctgggcctggcgggccttggtggcctgggccttgaatcgggcgatgtagctttccatgtgcgcacgttgcgcctgctgcttctcgtaggcctgttgttgctgggccaggcgttcggcgcgggcgcgttcgaacgcggtgtagccgccacggtagagggtgattttcttctgttcgacgtgggcgatgttatcgaccacggcgtcgaggaaatcccggtcgtgggaaatcagcagcaaagtaccctgatagttcttgaggaagtcttccagccacaggatcgcatcgaggtccaagtggttggtcggttcgtcgagcagcaacaggtcagacgggcacatcaacgcttgagccaggttcaggcgcatgcgccagccgccggagaagtcggcgaccgggcggtccatctgttcgttggtaaagcccaggccggcgagcattttgcgcgcgcgggcgtcagccgtgtagccgtcggcgctgtcgagttccgagtgcaggcgcgcctgtgcggcgccgtcctgggctttctcggcctcggccaggtcgtgttgcacctgacgcaggcgcaggtcgccgtcgagcacgtagtcgatcgcgatgcggtccagggtgtcgatctcctggcgcatatgggcgatgcgccagtcggccggcagcaagcagtccccggaatccggggtcagctcacccagcaacagggcgaacaacgtggatttgccggcgccgttggcaccgatcaggccggctttgtgaccggcgtgcagggtcagctcggcgtcttcgagaagacgttgcgggccacgctgtaatgttaggctttgaagtcggatcataatggcggcggagtctaccagcttcgttggccgctggcttgggtgtgaatatgtgcgctgacctgtggagctttgccctttcgacttacgcccgctcagggtgcgaggccgcttgcctgcgcttgcaggagcaaggtgcggacgtgtgcctgctgctgtgtggtgcgtggctggagcagcgcgcggtgacagcgaccgctgaacgtatgcaggcactcaaacaaatcgccagaccctggcaggcacaggtgattgcaccgttacgacaggtgcgcatgcaatggcgcgccatggcgcagcaggatgaggatatggcggggttacgcgaacgggtcaaggccctggagctggacgccgaacggcagttgctggcacgcctggaagcgttggcacaaacgtggccgactggcgatgcgggggaccggctagggtggctggaaggactggcggctgaggatgccgccaaccttgaccacgacgcgctgcatcagctgcgcgtcgtggccaccagcacttaggaagcgctggttggagtggcgcttggcgctaccggggcaggcgtgctgctggccggagcagttggagcggtggatgcagccggggcggcagcaggagttgctggcttggcagcagccggtttggcggctggcttagcggctggtttcgcagcagcaggtttagccgctggcttagcggctggtttcgcagcagcaggtttagccgctggcttggcggctggttttgcagcaacaggtttagccgctggcttggcggctggtttcgcagcagcaggtttagccgctggcttggcggctggtttcgcagcaacagttttagcaactggcttggcggctggctttgcagcagcggttttagcagctggcttggcggctggctttgcagcagcggttttagcagctggcttggcggctggtttcgcagcagcaggtttagccgctggcttggcggctggtttcgcagcagcggttttagcaactggcttggcagctggttttgcagcagcggttttagcagctggcttggcggctggttttgcagcagcggttttagcagctggcttggcggctggttttgcagcagcggttttagcagctggcttggcggctggttttgcagcagcggttttagcagctggcttggcggctggctttgcagcagcaggttttgctacggctttagcgggtgccttggcagcaacagctttgctcgccggcttcttcgccgcgctcgctgcaacagctttggctggggtgcgagcgcccaacaccttagccacggcttccttcacacgaccaacgccctgggccagtttcaggctttcctgagcatcttttttcagttgggaaatgtaggcgcgggtttcagcttggcgatccttgagggcgtccagcagatcctcaagttctttgacagcgtctttggctttggcttgtgccttggccttgccggcagtagcggcgtcttgcagtttggtgcgggatttgtgcagcttttcttgcgctttaccgcgttgtttttccagcttggcgagcagtttttctgcatctgccaacgcttgggaacaggcgctttccagatgttcgagcaagctgcccgagagttgttggagtaaatgcaacggggtattaacaggcttctgtttggccgacatggtttacctcctggctgacgtgggtgcggctcatactagccctctgctcttaccgccgctagggcatgttgacagtatcgtttgccttgcgttgcaccgtgagaaaattcttatcgatataacgaaaatacgcggcacttttgacgtcaccacactggcataatccgttgcactttcggcgggaggatgcccatgtcgcgttacctttttcttgtgctcggcctggcaatttcggtggccaatgcgagcgaacaatcgccggtaaaaaaccctgggcagaaccagcacgacctcgcctacagcctgggcgccagcctcggtgaacgcttgcgccaggaggttcccgacctgcagatccaggcgctgatcgacggcctcaagcaagcctatcaaggcaaacccctggcgctggacaacgcacgcatcgaacagattctggcccagcacgaagcacaaaacgaagctgatgcgcaggcacctcaaagcgaaaaagcgctcgcggccgaacaacaattcctgagcaaagaaaaagccgcaaaaggtgtgcgcgaattggcggatggcgtcctgctcaccgaactcaccccaggcactggcgacaagccgagggccagcgaccaggttcaagtgaagtacgtgggacggctacccgatgggacagtgttcgaccagagcgcgcaacctcaatggtttcgcctggacagtgtgatcagcggttggagcagcgcgttgcaacagatgccggtgggcgccaaatggcgcctggtgattccatcagcccaggcctatggcgccgacggtgccggcgaattgattccgccctatacacccctggtgttcgagatcgaattgctcggtacccgacactgaggcaataaaaaacggtgcgccatgcgcaccgtttttttgtaccgccgtcgtggatcaagcttgagtagcagactcttccttgtgggcgttgtgcagcacttcgatcaagcagtcttcgagttcgaatcgctcgtgaagcaacgcgcccaattctttgaatttatccgccacgcagttaccggcatcacacaggtcggtgaactccagcagcttctcggtgatgacatcgatacgcgggtagatggtctccgccaagtccaggccacgctgatcgtcgaaggcctccgcctccttggtcagttgctcgtagacaccgaaatggccggctgacacgtagtcaaccaacacaccacaaaagtcctgcaacggttcacggttctcggccagtgcttcaggcttggcgccaagagcatcaaaggcccgaaccagttcgtgacgtgccttcaaccagctgtcgatcagcttgtgcaccccaccccagcgttcctgagcattctgacaactttccagcatgatgatctctcttccctaataggggcgctgccgcctggtgcccgcgcaacacttcaaggataaagcagcagccggacaaggccgcatctgacaaacggtttcaacaacacgtgcgggccagattatgcccgcatgactatggcttcaaggtacgcaggagagaaagttcatacaagtgtttaatcccgccctacaaactgcgacccgatatcagcgcctcgccagacgcaaacgttggctcaaaaacagctgtgaaaattgcatgacgcccagtatcaacatcccaatgaagaacagcaggctccactccggcaggctcaagtcaaacagcgtccagttgatctcaacgcagtcgacggtgcctttgacagtcaattgcagagcctgccaaaacgacaggttttcgatcatgtaatgcaggctgggccagcaatcagccgactgtcccggtgcggcgttttgcagcagtacttggcgtatggcggtaatggcacccagcagtgcgaagcccatgctcgccagcccatacaggtagataaccaagcgcttggggtgatggagggcggcgaccagattgaccaatgtgaaaccggccaggaaaccccgttgcatctggcacagaaagcaaggacgcaacgagaccccgaactcgaggtaaaacgaggcgcccaatgtcagcgcacccgccaggaacgcaaggacatacaaggagcgtgaaggggccaaagacatgctttatccgcatcgcgaaagataggtcgctacggtagaggaaaggcctgaccgctttcaatacatgctggagcagacgattccgcgagagagtaaggagatcccgccagaagatggaagactttggacaacagagtgtcggactttgcccacaatcgcgctgatagccgctttctgaggtcctgagggattggctgccagaactatccgagccaaccctcgcctgtcttcctacctcaaacccgcgccgggacgggcagcggtgaagccagcaaacggttatccagcaaccccagcccttcctggaacaattggttactgcgctcggtgtcacccagttgggccaacaagcgcgccagctcggcgcaggcctcagggttgcgctgcacctgcaggctgctttccagataatcccgcgccttgccccacaaactgttttgcaggcacagacggcccaacgtcagcagcaggctggcatcgccaggatgatccttcagccaaccttcggcaaacttcagctgccgagccggatcgctgccacgcaacagaccgtacagccggatcaggtggctgtcgtaaccacgcttgatcgcgccacgcaatgcttcctcagccttggcgtcggcacccagttggcgcaattgctcggcgtaagccaggaccaattgcggctcctgacgctgtgcggaggtgagttgttgccaagcccgttcaagggactgcaagccggcctcgccctgttcttcgcgttgggctgcaaggctgaggttctcgccccacgcacgacgctcaagctcggccagttcactggcgggcaagactttatccttgcgcaattccggcaacaggcggatcaccgatgaccagtcgccccgctgctgatgcaagcgctgcaattggcgcagcacctgcgcattatggggatggcgctcgtgcatcgcttgcaaggtggtcagcgcaccctctgtatcaccacggtccagttgcagctgggcatggctcaaggcaaccgccagctcggcctggggctgacgctccagggcacgctccagcaaaccatcagactcttcgtagcgcccctgttcattggcagcacgggctgcgccgaggtagtacagcagcggctgacgctcggcttcggcagcgcggtgcaggtgacgctcggcgctggcccagcggccttcggcgaggtccatctggcctagttcgatggcgatctgcacgcggcggctgcggttgcgccgtgaccacgggttgaccacgccaccggaagtggtgaccaggctcagcagcacgcggatcagatagatcgtcaaacccatggcaaacaccgccaccacggtcgcccacaggctcgactcgtaatgcagcacgtgcggataggtgaccagcacgtagccagtgtgtttcgaaatgcccaccgccagcgccagcgcgatggcaatcgccagcaccaggatcacatagaaacgtttcatcggctctactcctgcttcgccggcgtcgccgccgccttggcttcgtcggcagacagatgacgccgctcaaggtacgcctgcacagccgccaggctcgcagccaggtccggcgtcactaccgacaccgccttgggctcaagctcggcgatacgtgccagcatcgccttgctctgcgggttgtcctggttgaagttgtcctgcaagacgctgcgcgcttcgcccaaggagcggctgtagaccgccgactcaccattgagcgcagcccattgtgcttgctccagggccaggctcagggccaggcgcacctggttcaagccttggccggccagcagcggacgaatgttgtcgtccgggttgaagtcgatgcggaagtagcgggaaatctgctcccaccattggctccagcggctttcggtgtccgaggtcgggcgtccttgggaagccggctcggtcaactgatattcaggggcgatggccgccaactgcacgacctggtcgcgcaaggccgccagttgcaggtacagcccggtgcggtccggctggtcggtgctgcgcagcgcggcaaggctcttagccaattgttcgcgggcagcgtaggagccagggtcgctttgttcgcgaagaatctcgtcggcaccctgcaccaatgcctgggcgctgttgatatcttgaagggcagaaaggcgcaggctcgccaggcgaatcaagtgttcggcctcggccaggcgccagtccttacggctggcgcccagcacggtttccaggcgctggctcaggcgttgctggtcgccctgcaactgggccaccaggcgacggcgctcctccagctcatccgcacctggcaactgcgccaggcgcgccgccagttgttgctggctttgcttgagggactgggactggtcatcgagggtctgcacctggcccaactgctgttggctgctggcctgcagggcgcggacctgccaaatcccccaaccgccggcggcaacaccggcggcgccgagcagcagggcgatgattgccaggccattgccacggcgcggcgcggtgaccggtgactcaaccggcgcatcaagcgcgggctgggcttcatctttaggcaaggctgtttcgctcacgtatccgtcctttgcgtttcagagagtgggaacggtatagctccgtatcgccactaacaaagccgcggcactcgcaccacgacaatccacaactttttctgcaccggcggcccgcgccatctcctggactcgcgggctcggcacgaacaacggtagctgtgccacttggggccaatcggctccggccagggcttgcaggtgtaaaaaaccctgcccactgctgaccaccaggccgttcaagcgttccaactggatgcgttgcatcagtaccccggcgtcgtaggccggcaggaaacggcgatacaactccaggtagtcgacactagcaccttgctcacgcaaacgctccgccagcagctcacgccccccctcgcctcgcaggatcaagacctgggcatcagggcgtgcgatagcctcgcgcaacgcaggcaattgaagcaaggcctcgctgtcgtcgccagtggggggatagtgaacgttgaggccgtgatcagccaatacctgcgcggtggcggcgccgacactgaaccatggcaactgcggccatgcgcgatccagctgcgcgaccgcaagtcgcgccgccggcttgcttactacgatcaccgcgcagtagcggctcaggtcatggaagacagcctgctgttcaggagtgacaggcagcggttcaatatccagcaacggcaagctgctgctgaaaacccccgcatcggacaacgtggccgccagggccatcgattcctcggcaggccgcgtcagcagcacacgccattcggtcactgcgggccggcctcgccgtagactttttgcagaatggcaccggcgcccttctccagcagcgcttcagccacctggataccgagggccgtggcatcccgttgcgggccacggacctcggcggccagcagggtgccgccttccggatcacccaccaggccacgcaaccacaggttttcaccttcgagcacggcgtagcaggcgatcggcacctggcaaccaccattaaggtgcttgttcagggcgcgctcggccgtgacgcgcacttcggtatcgtggtgatcgaggggtttgagcagggtatggatttcgctgtcggcggtgcggcattcgatacccacggcgccttgtccaccagcgggaaggctatcctcgacgctaatggctgaggtgatacggtcttcaaagcccaggcggatcaagccggcggcggcgagaatgatcgcgtcatattcaccggcgtccagcttcgccaggcgggtgttgacgttgccgcgcaggaagcgaatctgcaggtccgggcggcgagtcagcagctgtgcctggcggcgcaggctcgacgtaccgacgatgctgcccaggggcaactcatccaacgatgcatacgtgttggaaacgaaggcgtcacgcgggtcttcacgctcacagatgcaaaacaggcccaggccttcgggaaagtccatgggtacgtctttcatcgaatgcacggcgatgtcggcttcattttccagcagcgcggtttccagttccttgacgaacaggcccttgccgccgatcttcgacagtggcgagtcgagcagcttgtcgccgcgactgaccatgggcaccagggacaccttcaggccagggtgggcctgctccaggcgtgctttgacgtattcggcctgccacaaggccagggcgcttttacgggtggcgatgcggatttcgcgagaggacatggatcaatccgtactgaatagatacggcagataataacagctcaggcaaatacgctttgatttgaatcagcaagtgcggggcctccctggccacgtcgcaccgggatatggaatgcaggcctcgctacagcccgtgggctaaagctgctgcatcatcttgcgcacaccggccacatgccgtcggctgacgatcaacgcgtcgccgttaaggcctttgaggaatagctggaaatgccccaggggcgtgcgctgcaaccgttcgatgcgctcacgggccaccagcgcgttgcggtggatacgcacgaagcggtcgccgaattcatcctcaagcgccttgagcggttcatcgagcaacacttcgccgccctggtgacgcagcgtcacgtacttgtgatcggcaataaaatagaccacttcacccagcgggataagttcgatgcctttgcgggtacgggcgctgatatgactgcgtggcccgttaccactttgggcggcaggctgagtcagggcggcaagctggacgcgcgttgggcgctcagcctttttgagggccttgagcaaggcgtcacccaccaccggtttggtgaggaagctgacaccgctggcttccagcgtttccgcggaaaactcttcaccggctgcgcaaaacaccacggcaggtggcgactctcgttcgctcaatcgagccgcaacttgcaagccatcgaggcccggcatacggatatcgagcaacaccacatccggcttgaggctgtcgatcagcgtcaacgcctcttcgcccgtggtggcgctcggttctaatactgcgtaaccctcgagctcactgaccagacggctcagtcgctcgcgggcttggggttcgtcatcaacgatcaggacattcatattgcgctggattcctgcgtgagtctcgcacaaggatagcgtagacaggtgcggtgacttgcgtcacagcgatccacgctaagactagcgcgagcggcaaaaagtgccctgagagtggcacccatatttacccggacctgttcaatagcgcccaagacctgctgccttcgggcatcgtcgtagggtttgctgatacacaatccgaatacccccctttttttaatggatagtctgggctctgaccgcattacccgactttggtgcattcacacactatcagtccaactgtagacgctcgctgagacgacattgctcaatcgtcaaatatcgtttcaataaagccccttcgctcagtctcgtcctggacgcggtcggcggcaaggcacttagccatcctttgcacaaataaaaatgccgacgacccgcggcaccgcgtccacgggcaaccctgttattatcgccggcacacttccatgcctcttattaagcagatcacgagcgaatccatgagcaccgacaagaccaaccagtcctggggcggccgcttcagtgaacccgtcgacgccttcgtcgcccgcttcaccgcctccgtcaccttcgaccagcgcctgtaccgccacgacatcatgggctccatcgcccacgcgacgatgctggccaaggtcggcgtgctgaccgatgccgagcgcgatagcatcatcgacggcctgaccaccatccgtggcgagatcgaagccggcacgttcgactggcgcgtcgacctggaagacgtgcacatgaacatcgaggcccgcctcaccgaccgcatcggtgtgaccggcaaaaagctgcacaccggccgtagccgtaatgaccaggtggccaccgatatccgcctgtggttgcgtgacgagatcgacctgatcctgtccgaaatcacccgcctgcagaaaggtttgctggagcaggccgagcgtgaatcggacaccatcatgccgggcttcactcacctgcagaccgcgcaaccggtgaccttcggccaccatctgctggcctggttcgaaatgctcagccgcgactacgagcgcctggtggactgccgcaagcgtgccaaccgcatgcctctgggcagcgccgctctggccggcaccacttacccgatcgaccgcgagtacaccgcacaattgctgggcttcgacgccgttggcggcaactcgctggacggcgtgtcggaccgtgacttcgccatcgaattctgtgccgccgccagtattgcgatgatgcacctgtcgcgcttctccgaagagctggtgctgtggaccagcgcgcaattccagttcatcgacctgccggaccgcttctgcaccggcagctcgatcatgccgcaaaagaaaaaccccgacgtgcccgaactggtgcgtggcaagagcggccgcgtgttcggcgccttgatgggcctgctgaccctgatgaaaggtcaacccctggcctacaacaaggacaaccaggaagacaaggagccgctgttcgacgccgccgacaccctgcgagactcgctgcgcgcgtttgccgacatgatcccggcgatcaagcccaagcacgcgatcatgcgtgaagcggcgctgcgcgggttctctaccgcaaccgacctggcggactatctggtgcgccgtggcctgccgttccgcgattgccacgaaatcgtcggccatgctgtgaagtacggcgtggacaccggcaaggacctggcggaaatgagcctggaggaactgcgccagttcagcgaccagatcgaacaggacgtgtttgccgtgctgaccctggaaggttcggtgaatgctcgtaaccacgtgggcgggactgcgccggcgcaggtcaaggcagccgtcgtacgcggccaggctttactgtctagccgctgaaaaatgtgggagggggcttgcccccgatagcggtgggccagccagcacatgtgttgcctgacactctgctatcgggggcaagccccctcccacacttgatcactttttggctgcgatcatcgccacaaacgccggcatcgccgcctccctgtccgccgccaccttctgtgcgttgggcatggcatgcaaccgctccagcaacgccttggccgccggcatgtcagccagaaaatccaggccaaacagcttctcgcccaccgcacaggcgaggttcacgctgtacatgaagtacaaatccgcaatcgtgaagctttcccccgccacatacggcgcgaacttgccgtgcctgctcagcgcaccgacccccagtagcaactcggacctggacttctccttgatcgcctccggcaccggcatgcccataaacgcttcggcgtaacacgcgcgggccggcagctcgatgtacaactcgatctccctgcacagcgccagcacctgggctcgctggaacggctcggcgggcagcagcgaaggcccttcctgggtctgttcgatgtattcgaggatcacgctggtttcgttgataaacccctgcttgacgccgaggaccggcaccttgccacgtgggctgaccgcaaagacatcgggggtctgcccggagaaaaaaggcacctcttcgaaaggcagccctttctccagcagcgccagcttgaccatgttgtagtagttactgaccgaaaatccgtagagcttgagcattgcaggtgcctccaggccgggaatggggttggctgcaagggttatagccccgagggcccggccttgccagcagcatcagccgcctgaatgggggtagactggcgccctttccttgaggagcctgccatgagcgagcctaccgatatcgacaacgacgaagaagaattcgccgaaaccaccctgatcgaagcgatcgaaaaccagatcgaaagcgaaaacccaccggcggccaaagccacgttcaacaagctgaccctggtgggttacgaacgtgaagagattctgcaactgatggcccacgtgctggctgtcgaaatcgatgcgctgctggaagaagaccgcgccttcaataccgaatggtatgaaactgcactgcgcgccctgccagaactgcctccggaaaagcaataatccaggggcgcagcaacacgctggacagttcggcaaagtgcgttcaccttatggcctgctagcctctaataaattcttagaaagtctggagtccttatgtcgtatacccctgagttggttgccgaactggaaatccttgtgctcttcccattggacagcaccaaggaaggtctgaaagttcaccagaccgctgcgcccactgccatcgccgctgccatgcgcctgcacgcgaaaggacttatcgaccaaccggacgggggctacctgaccagccttggccgggacgctgcagaacaagcccagaccctgctgactatcttgaccaccgccaccaccaaagaagccgcctgatacctgacaccgcccatggagtccgccccgtgcggattccgagggcgttgccgtgcacgcgcaaaaaatctgacgtcaaaaaccatttctctctaaacctcctacgctactggctgtaaactcctacacggctgcccacgtcgggccctgcgagccaccgacctcgacatgacccgcacccatgaaatccgccccgacctggacgaaggcatcgaccgcaaggtgctggcccaattgcgtgcgcgtttcatggccctcaacgaaggccgcatggcccgggctgtcgaagggctgacaccgcgccagcaaagcgtgctgaccttgttgccgctgttcttccacgtcaatcacccgctgctgcctggctatgtgtcgggcagtacaccggccggcctctcgaatttcgagcccgacgcccaggcgttgaccgaagcccagcgcctgacccgctcgttctcctacaagccacgccacggcaacccaccacggccaatccacggcctgttcctcatgggtagccttggcaccctggcccaggccgaccagagcgacatggacgtgtgggtgtgtcacgcccccgatctcggcgaaaacgaactggccgaactgcgcaagaaatgccaactgctggaagcctgggccttgaccatgggcgccgaggcacacttcttcctgatcgagccgacacgcttcgtgctcggtgagcgcgacacccaactgagttccgacgattgcggcaccacccagcattacctgctgctggacgagttctaccgcaccgccatctggctggccgggcgtacgccgatctggtggctggtgccggtgtatgaagaaactcgttatgccgagttcacccacacgctgatttccaagcgctttatccgcgccgacgaaaccctggaccttggtcacctggcgcgcatccccccgggcgagttcatcggcgccgggctgtggcaactattcaagggcatcgagtcgccctacaagtcggtgctcaagctgctgctgaccgaggtctacgccagcgagcacccgaacgtgcactgcctgagcctgcgtttcaagcgggcggtattcgccaaccagatggatctggatgagctggacccgtacatcgtggtgtaccgccgcatcgaggaatacctcaaggcccgcaacgagcccgagcgcctggaactggtgcggcgcgcgctgtacctgaaggtcaaccgcaaactcagcgccggccagcgcagcaccagctggcaacgcctactgctggagcgcctggcccatgaatggggctgggaccagcgccaactgacactgctggacagtcgcagccagtggaaagtacgccaggtcgcctccgagcgccgcgcactggtcaacgagctcaattacagctatcgcttcctgacccagttcgcccgcaccgaacagaccgtcagcctgatcaacaagcgcgacctcaatgtgctgggccggcgcctgtacgccgcctttgaacgcaaggccggcaaagtcgagttcatcaaccccggcatcgccccggacttggccgaagacaccctgaccctggtgcaatcacccaatcgcaaggagccgggccagcaccactggggcctgtacaacggcaacctgacagccctggagtgggagcacttcgcgccgatcaagcgcagccgcgacctgctggagatgctcacctggtgccatcgcaacggcgtgatcgacagcagcacccgcctggccctgcaccccggcaccagcgacatgaccgagttcgagctgttcaacctgctgggcagcctgcaacagagcatcgccctgcccctggccagcgtcgatgaagagcgcctgctgcgctcggcagtacccgaggaagtgctgctactgatcaacgtcggcgtcgacccgctcaagcaccaccgcgacctgaacatcctgatgaccaccgagcgcaccgactccctgagctatgccggggtgcgcgacaacctcgtgctgaccctggaccaagtcacgctcaatagctggaacgaggtgatggtcagccgctacgacggccctcacgccctgctcgactgcctgcgcgactacctcaaccagttgccggcagaccatctgccacggctgcgggtgcgctgcttctgtcacaaccgtgcgcagttcattgcccagcgcgtggaagaaatcttcgacaccgcgcagaacctgctgctgggccagggcaatcatcgttacctgctccaggtgcagcagcactatcacgtgatggagttgataccgggccaggccactcacgtgtcactgccgacccaggaggcgctgatcgcctacctcagcgaagaactggccagctacagcccgctgcacctggacgccatggcactggaagaccatgacctggcgctgctgctgccgatgggcctggccgattgtgtgcaggtgttttaccgggtcaacgagggcttcgccgagctgtatgtgctggatgagttcaacgcgctgtggcaacagcgcttgccgttccatgacgaacagagcctgctggcgccgttgcagcgtttcttgcagtcgatcatttatcgccgcgacgcgctgtcaccgctggacccgcatgagccactgggcgcagtgcaaaccttgtattaccaactgttgccgtcgggcagcggtcgcgcgcgcggcatcgagcctcgtcctgcgccgttgaacccggcgaacaaaccgttctatgacgtgcaggcgattatcggcaaggcagcgctgggccaggtggggatcaccctgtactgcaatcagcgggagttttccgagctggaatttggcgaccagttgtttgcggtggtcgcccaggaaatcgtcgggcaacgccgggagcccgaacgttaccgctgctacatcaccgacctcgacctgtccggcctgctcggtgatgtgcaaagcccaagcaacctgtacctgcggtacaaggccgagctggaactgtcgctcaacgaggcgctgggccagatttaaagggggaaggcaccgccgtctttaggctggccttcaacactgagcaattccagcttgagcgtcttgccacccggggccggccagtcgatgtgctggccaacctgcagacccagcaaggcgctgcccaccggcgccaggatcgaaatcttgccttcatcggcattggcgtctttcgggtagaccagggtcaagtggtaatccttgccgctgccttgctcacggcaatgcacgctggagttcatggtcacgacacccgcaggcacttcatcgtggccaaccacttcttcggcgcggtcgagttcggcttgcaacgcttcgacgccgggagattcgtcgcccaggcggtcgatcagttgctccagacgctgcacgtcaagacgggtgaggatgatggacggtgcggtggtcatgattcaggcagactccttttttctgcacaaaaaagcaaaaccccgccaggaaaggcggggttctcacgggcctcgatgagttgaggcgtatccggacactaccacagcgtcacaaataaacaagacagcctcaggcgtgggcccggcgctgctcggcctcggcgcagatgatccggcgccgtgcatcgtcggcagagcgccattcacggatgtcttccacatggcggaagcagccgaggcagactttctgctcatccaggcgacacaaactgatacaaggtgacggcaccgccgggctgacattactgaacagtggcttgggcggacgtacggttgcagactgggtcacgatcaaatctcgtcgaagtccagcgcttcgccggtatattcctcgaccaggcgcgcgagcatttcacccaacagctcctcacttttgtcgcactgccatttgccgctttcttcgtcatagtcgaagtgaacgccaccggaacgtgctgcaagccacagctgacgcaaaggctcctggcggctgaagatcagttgctgaccgctctcgaacttgacggtcagcacgccagccgagttttccaggtccacgtccaggccgctgtcatcgaaaatatcttccagcgcctgctgggtcgaatccaccaggtcgtgaaaacgggcttcggtcaaactcattgtggcaacctcaaaagtgtctggttttgctcaagcgccgcacgatacgggcgagccccgccgattgcaaaggataccgattccatcgcgattggcggtacgaaatatccacggccagcgtagtccacttcgtaaccatgtcggcaaacccccgccggacgggtattccagcgcataggcaagctggcgggtggtcggtatactcgggcgcaattaatgcatattcaaggatttcgccatgaagcgcctgatctcttcccttgctgcgctcgtcgcggtcgcttgcctcgttagtgcctgtggtcaaaaaggcccgctgtacctgcctgatgacagcaaagacccgaatgaacaggcgcaatcgtcgcaaaaaccatccaaagcgcataagcacgacacctacgaataagggtactccatggacgcttttaactaccgggacggcgagctgttcgcggaaggcgtggcgttgtccgcgattgcccagcgctttggcaccccgacctatgtgtactcccgtgcgcatatcgaagcccagtaccgctcgttcaccgatgcgctcgacggcgtgccgcacctggtgtgctacgcggtcaaggccaactccaacctgggtgtactgaatgtcctggcgcgcctcggcgctggttttgacatcgtctcccgtggcgagctggaacgtgtactggcggctggcggcaaggcggacaagatcgtgttctccggcgtcggcaagacccgcgaagacatgcgccgcgccctggaagtcggcgtgcattgcttcaacatcgagtccaccgacgaacttgagcgcctgcaggtcgtggccgccgagatgggcgttcgcgcgccgatctccctgcgcgtcaacccggacgtcgacgccggcacccacccgtacatttccaccggtctcaaagagaacaagttcggcatcgccattgccgacgccgaagacgtgtacatccgcgccgcccaactgccgaacctggaagtgctgggcgtcgactgccatatcggctcgcaactgaccagcctgccaccgttcctggatgccctcgatcgcctgctggcgctgatcgaccgtctcggtgaatgcggcatctacctgcaccacatcgacctcggtggtggtgtaggcgtgcgttatcgcgacgaagagccgccgctgattgccgactatatccaggccgtgcgcgagcgcatcgaaggccgcgacctgacgctgatgttcgagccgggccgctatatcgtcgccaacgcgggcgtgctgctgacccaggtcgagtacctcaagcacaccgagcacaaagacttcgccatcgtcgacgcggcgatgaacgacctgatccgcccggcgctgtaccaggcctggatgaatgtcaccgccgtgacgcctcgcgccagcgaagcccgcgcctacgacatcgtcggcccgatctgcgagaccggcgacttcctggccaaggatcgtcagctggccctggaagaaggcgatctgctggccgtgcattcggctggtgcctatgggtttgtcatgagttccaactacaacacccgcgggcgtaccgccgaggtgctggtggacggtgatcaagcgtttgaagtgcgtcgccgcgagacggtagccgagttgtatgctggcgaaagcctgctgccggagtaagccatgctgctgcgttttaccaagatgcacgggctgggcaatgatttcatggtcctcgacctggtcagccagcacgcgcatatcctgcccaagcacgctaaacagtggggcgatcgtcacactggcattggtttcgaccagttgctgatcgtcgaggcaccgagcaacccggaagtggatttccgttatcggatcttcaactccgacggttccgaagtggaacagtgcggcaacggtgcgcgctgcttcgcgcgttttgtgctggacaagcgcctgaccgccaagcggcagatccgcgtcgagaccaagagcggcgtgatcgagctggatatccgcagcgatggccagatcagcgtcaacatgggcgcgccacgcctggtgccagcggatattccgttccaggccaccgagcaggccgtcagctatgcgctggacgtggacggcaagaccgtcgacatcgctgcagtgtccatgggcaacccccatgccgtgctgcgggtcaacgacatcaacaacgcgccggtgcatgagctgggcgcgaaaatcgaacaccacccgcgctttccggcacgggtgaatgtgggcttcctgcaggtgatcgaccgtacccgcgcgcaattgcgcgtgtgggaacgcggcgccggcgaaacccaggcctgcggcaccggtgcgtgcgccgctgccgtggccgcgatcagccaggggtggatggattcgccactgctgatcgacctgcccggcggacgcttgtccatcgagtgggcaggccctggccacccggtgatgatgaccgggccggcctcgcgcgtatacgaaggacaggtccgtctatgagtgagccaagccaatgaccgataagcctcaagtacccgcacccgctaccccgagcgacagcctggaggccgccactgttgcggcgtaccttgaggctaacccggacttcttcgtcgagcacgaagagttgctgccggcactgcgcatcccccatcaacgtggggataccgtatcgctggtggaacggcagatgaagatcctgcgcgagcgcaacattgaaatgcgccacaagctctcgcacctgatggacgtcgcccgcgacaacgatcgcctgttcgagaaaacccgccgcctgatcctgaccctgatggacgccaccagcctggaagaaacggtgatcgcggtggaagacagcctgcgccaggacttccaggtgccattcgtgagcctgatcctgttcagcgacaacccgatgccggtgggtcgatgggtcagcggcagcgacgcacaaaccgcaatcggcggcctgctgtccgagggcaagaccatcagcggcaccttgcgcgagcatgagctggacttcctgttcggcgccgaacagcgcaagcagatcggctccaccgccgtcgtcgccctcagtcatcaaggcctgcatggcgtgctggccatcgccagccgcgatcctcagcactacaaaagctccgtgggcaccttgttcctgacctacatcgccgaagtgctgggccgcgtcctgccgcggttcaccaccgccctgcgcgcggtgcgctagccatggaacggcaactggacgcttactgcgctcacctgcgcaacgagcgccaggtgtcgccccataccctggaagcctatcggcgggacttgaacaaggtcctggcgtactgcgagaaacaacggatcgacagctggaaggccctggatatccagggcctgcgcagcctgatcgcgcgcctgcaccaggccggccaatcctcgcgcagcctgtcacgcctgctctcggcggtgcgcgggctctatcactacctgaatcgcgagggcctgtgcgaccacgacccggccaacggcctgtcgccgcccaagggcgagcggcgcctgcccaagaccctggacactgaccgtgccctgcaactgctcgatggtgcggtcgaggatgacttcctggcccaccgcgaccaggcgattttggaactgttctattcctcgggcctgcgcctttctgagctgaccggcctgaacctggatcaactggacctggcagacggcctggtgcaagtgctcggcaagggcagcaagacccgcgtcctgccggtaggccgcaaggcacgggaggcgttgcagctgtggttgccgctgcgcctgttgaccaacccggcggacgatgcggtgttcgtcagccagcaaggccggcgtcttggaccaagggcgatccaggtgcgggtgaaggccgccggggagcgagagctggggcagaacctgcacccacatatgctgcgacactctttcgccagccatctgctggaatcgtcccaggacctgcgcgcggttcaagagctgcttggccactcggacatcaagaccacacagatctatacccatctggatttccaacacctggcaacggtgtacgacagcgcccacccacgggccaaacgcatcaaggacggcgactcatgagtatcaagctgatcaccttcgacctggacgatacgctctgggacaacgtacccgtcatcatcagcgccgaagcgtcgatgcgcgaatggttggcgcttaacgccgccaaagtcggcgatttgccgctggagcacttcgccagtcttcgccagcaggtgttggagcgccatcccgagctgaaacaccgcatcagcatcctgcgccaccgggtgttgaagcatgcgtttgaagaggctggttatccacagcctgaggccacggaaatggcggatgagtgcttcgaagcattcattcatgcgcgccaccagctcaccccgttccccgaagccgagcccatgctcaaggcactgcgtcagcacttcctgctgggtgtgatcaccaacggtaatgcggatgtgcagcgcgttggcctcgcggactacttccattttgcgctgcgcgccgaagatatcggcatcgccaagccggatgcgcggttgtttcaggaggcgttgcagcgtggtggcgtagacgctggtgcggcggtgcatgttggcgatcacccgggggatgatattgccggggcgcagcaggcggggttacgggcggtgtggtttaacccgacgggtaaggtatgggagggagacaagcgaccggatgcgcagattcgtagcctgacagagttgccggaactgctgcgcagctggaagtaataccgcaggtcaaaatgtgggagggggcttgcccccgattacagtgggtcagccaatatattcgttggctgatacgccgctatcgggggcaagccccctcccacattttttatcgccggtgacctccaggcatgaaaaagcccgcagcgacggcgggctttttcttacaagcaggtgacggacctcaaataggtcggctgccgtacttgttatccggcttcttcggtgggtctgccaccacgttggcctcgacttcctgcactttgccgcctttagcgaggaattcttccatcgcacgggccagggcatcacgctctttgttcttggcttcaacgcttggcaattcgtctaccgacacagctgccttggctttgcctttggcgaccgggacaggtgcatcatcgccaccgtcgtcgtcggcaacgtcttccgccgccgcttcgaggccttcttcggtgtcgtcttcgtcacctacttcgagttcgtcgttttccagatcatcgtcgctcatgttctacctcatgacttgcgaaaagcagattagttatagcccagcttcaccctctgtcgacggctgccggaaaaaaatcaacatccactggttaaccagtggcttatgccccatcaccgtgcaaggtggcgaggactttacgagcaccgccatgatcacggtgctcgcccagataaacaccttgccaggtccccatcgccaagcggccggccttcaccggcaaactcagctggcagcccaggagactggccttgaagtgcgccggcaggtcgtccggaccttcgtcgttgtgttcgaaccctgcacggccttgcggcaccagcgaattgaaataacgttcgaagtcacggcgtaccgccgggtcggcattctcgttgacggtcaacgaggccgaggtgtgctgcagccacagatgcaacaagcccacacgacaggccttcaattcaggcaagccggccagcaactcatcggttaccaggtgaaagccccggggcttggcccgcagggtaatcagggtctgttgccacatacagttctccgcccatcggcgcgcattctagcgcgctcagggaaaaaacaaagtgccgaatacgcctacatgcctgtaagacattggcatgcggaaaagtgccgtgtgcatcccatcacaaacatcgcttaaaaaccgctacagcgtgttacgactgacaaacaccaggcaaaaaaatgcccggcaagccgggcatctttttttcgcgtacttacaagttgtagccgcgttcgttgtgttgcgccaggtcgaggccgaccgcctcttcctcttcggtcacccgcaggcccatgaccatgtccagcaccttgaggatgatgaacgtcacgatagcggtgtagatcaccgtgaagccgacgcctttggcctggatccagacctgtgcagccacgtcagtcaccgtgccgaagccgcccagtgctggggctgcgaacacaccggtgaggatcgcaccgacgataccgccgataccgtgcacaccgaatgcgtccagggagtcgtcgtaacccagcttgcgcttgaggctggtggcgcagaagaagcagatcacaccggcgaccaggccgatcaccagggcgcccattgggcctacggtgccagcagccggagtgattgccaccaggcccgccaccacacccgaggcgatgcccagtgcgcttggcttaccgtgagtgatccactcggcgaacatccagcccagcgccgcagcagcggtagcgatctgggtgaccagcatcgccatgccggcagtgccgttggccgcagcggcagagccggcgttgaagccgaaccagccgatccacagcatcgccgcgccgatcagggtgtaaccgagattgtgcggtgccatcggggtggtcgggaagcctttacgcttgccgagcacgatgcacgccaccaggccagccacaccggcgttgatgtgcaccacggtgccgccagcgaagtcgagcactccccagtcacccagcaacgaacccggaccgccccacaccatgtgggcaatcggcgcatacaccagggtgaaccagacgcccatgaagatcagcatcgcggagaacttcatacgctcggcgaacgcaccgacgatcagcgccggggtgatgatggcgaaggtcatctggaaggtgacgaacaccgcctcagggaacagcgccgcagggccggtgatgctcgccggggtcacacccgcgaggaacaacttggacaaaccgcccacgaacgagttgaagttgacgacgcccgcttccatcccggtggtgtcgaacgccatgctgtagccgtacacgaaccacaggatggtgatcaggccggtgatggcgaagcactgcatcatcacggaaagaatgtttttggagcgcaccatgccgccgtagaacagcgccaggcctggaatggtcatgaacagcaccagcgcggtggatgtgagcatccacgccgtgtcgccggaattgaggactggagccgccacttcgtctgccgccatggccaggcttggcattacgatggacaacagggctccgagccctgcgaatttacgcagagtcatattgttttctcctggggcgttggggtttggcggcttagattgcgtcggtatcggtttcgccggtacggatgcgaatagcctgttccagattgaccacgaagatcttgccgtcaccaatcttgccggtgttggcagccttggttatcgcctcgataacccggtcaagatccttgtcgtcaatggcgacatcaatcttcaccttcggcaggaaatcgactacgtattccgcgccgcgatacagctcggtgtgacccttctgccgaccgaagcctttgacctcagtaacggtaatgccctgcacgccgatctcggacaacgactcgcgtacatcgtccaacttgaacggcttgatgatggcagtgactagcttcatgaaaactctctcccgaattggtggacttgccccaggaaaacaaacccgtctcaagtctaagcgcagtgcctggctttgtaacgcgtcgtcgcctcagcatttgccgttgcgacgccagcgaaccactggtgacgaaacctgtacccctgatccgtcggcgcactgcattcgtcacagcgactgcatcagtgcatgggtcatgatcgtctaagcagaaaccttgccagctccgtaaaaatcactgaaatcagtcctttgcccactttctcccaactgcggggctttttgatggcgtcaatgcgcacaaaaacagtgcgccaccgcccggcccgctgcgcgaaaagcgtgcgctcgccgccacggaaaagactatagacgctgcgtgatacactgccggccaacagttttccggaatatttcccatgctcgcgcccaaagacctcctcgacgccctgagcggccacgcctctcgcctgttcagcggcgacaccccgctgccccgcaatgaaatcgaaagccagttcaaggcgctgctgcaaagcggcttcagcaagctcgacctggtgagccgggaagagtttgatagccagatggtggtgctggcccgcacgcgggcgcggttggagagcctggaggcgaaggtagcggagttggaagctaggttgacgccgccctctgctgaataaacgcggtcagtgtgggagctggcttgcctgctcccacataaagcgctgcgaacgactctggatacgttctgtaaaacctccctcgcctcgcatttccccacctcgtctacccttgaaaaacccgcaggaagcggccctcttttcaaggaacgagcatgtccctcgccatcgtccacagccgcgcccagatcggcgtcgaagcgcctgccgtcaccgtcgaagtgcacatggccaatggtttgccgtccctgacactcgtcggcttgccggaaacagccgtcaaggaaagcaaggaccgggtgcgtagcgccattctcaactccgccctgcaataccccgcccgacgcatcaccctcaacctggcgcccgccgacctgcccaaggacggcgggcgctttgacttggcgattgcgttgggcatcctggcggccagcgtgcaggtgccagccttgctgctcgacgacgtggaatgtctgggagaattggcgctgtccggcgaggtgcgcgcagtgaaaggcgtgttgcctgcggcattggcggcgcgcaaggccgggcgcaccgtgatagtgcctcgggcgaatgccgaggaagcgtgcctggcctcggggttgaaggtgatcgcggtggatcatttgctgcaggtggtggcgcacctgaatgggcatcagcctatagaaccctacaaatccgacggcttgctgtacctgaacaagccatacccggacctgagcgaagtacagggccagctcgccgccaagcgcgcattgctgattgcagcggcgggcgcgcataacctgctgttcagcggcccgcccggcaccggcaagaccttgctcgccagtcgcctgccgggtttgttgccgccgttgagcgagcaggaagccctggaagtggcggcgatccagtcggtcgtcagccttgcgccgctgagtcactggccacaccgaccgtttcgccagccgcaccactctgcctcaggtccggcattggtgggcggcgggtcgaaaccgcagccgggggaaattaccctggcccatcacggcgtgctgttcctcgatgagttgcctgagttcgaccgcaaggtgctggaggtgctgcgcgagcctctggaatcgggtcacatcgtcatctcccgcgcccgcgatcgcgtcagcttcccggcccgcttccaactggtagccgccatgaacccctgcccttgcgggtacatgggcgaacccagcgggcgttgtcgctgcacgccggagcagattcagcgctatcgcaacaagctctccggccccttgttggaccgtattgatttgcacctcactgtggcgcgagaaaccaccgcattgaacccaacccagcaggcgggcgataacaccgccgaggcatcggcacgggtcgcccaggcccgcgatcgccaacagcaacgccagggctgtgcaaatgcgttccttgatctgccggggctgcgcaagcactgcaagctgacgaagaccgatgaaggctggctggaaaccgcctgtgaacggctgacactatccctgcgcgctgcccatcgcctgctcaaagtggcgcgtaccctggccgaccttgagcacgccgagagcattactcgaccgcacttggcggaagcgttgcagtatcggcccgcggccgtcggctagggtgcctctgggaagtccaacagcaggcgcgccacttccatcacttcatccaaggccgcttccgccgactccatggagggtttgagcatcaggtcgtcggcatagcccatcgccacggcaaagatctggcgggcagcgcgttgtggcgagtcacaacgcaggacattggcagccacaccccgctcgatcacctcgacgagcatgccttgccattgggcgttgatcgccaggtaagcctgggccatttccgggtcctgcatcgcttcgtcccaagcatccagccacagtgcccaccctgcatcagcggtgcttggcaggcagtcacgcaaaaaacccacaaaggcgtccaagggcgctgcttctgccaggggcgcgcgcacttcgtccaactgttcgttggcaaaccgcacgaaggcttcgcggcgcagttccttccagtcgctgaagtagtgatagacatggctgcgggacaggccggcatgttcggccaggtcgcgggtggacacatcggcaaaacccttgctgcgaaacagctcaagggcggcggcgatgatctggtctttacggtcgatacgcgacatgggcaattccttccaggcaccggcagataagcggcgcttgctttttgagcgatcgctcaaggatacttgagcagtcgctcaataatagcgtctatcactcctttggtgcaccccatgtcatccgccacacctcaaatcctgatcgaagaaagccggaaaatcggccagcaatccgccggccagacgctcaaggccattgccaaagcctatccgggcaagctgtttgccacgctgtcgctggtcgcgctggagaacgcgctgctgctggcctacccgttgtttgccgggtttgcggtggacgcgatcatccgtggcgacgccagcaacgcgctgttctacgccgccgtggtcctggcattctgggtggtcggcgcggcgcggcgggcgttggatacgcggaccttcacacggatctacgccgatctggcggtgccggtgatcctcaatcaacgcctgcagaaccacagcacgtcgaaatcggcggcacgggtggtgctcgcccgggagttcgtcgacttctttgaaaagcatgtaccgatcattgccacggcgctggtgtcgattatcggcgcggcggtgatgttgatcgtgatcgagccctgggtaggcctggcgtgcctgggcgcactggtgctgtgcatcacgttgttgccacgctttgcccggcgcaaccaggagctgcatgaacggctgaacaaccggctggaaaaagaaatcggcctggtggaaaaggtcggcgcaccgaccctgcggcgccactaccaggtgctttcacgcctgcgcatctggctgtcggatcgtgaggcggctgcgtacctgtttctgggtacgctggccgccttgctgtttgtggtcgccatcagccaattggcgctgtcacccgcggtcaaggctggccatatctacgcggtcatgacctacctgtggaccttcgtcaccagcatggacgaagcccccggcatggtcgaccaactggcgcgcctgaaggacatcggcaagcgcgttgaccctggcctgggcgatcgctaggcctcaacgaaaccggtccacctcatgccgcaagcccgccgccagggtttcgagttccttggcggtgatcgccaggttcgacaccacttcccgctgctcgctgttggccagcgcaatgctctgcaagttgctgctgagcaaggtcgcggtgctgctctgttcctgggtggcggtggtgatcgcggcaaactgctgaccggccgagcggctctgctcgtcgatacgcgccagggccgacgccacatcggcgttgcgcgacaggccttcctgcatcagcacattgccgtgttccatggtgctgatggcgttgccggtttcctgctggatgctctggatcatcccggagatttcatcggtggcctcgcgggtgcgcgacgccaggttgcgcacttcatcggcgactaccgcaaacccacgaccctgttctccggcacgagccgcttcgatggcggcattgagcgccagcaggttggtctggtcggcgatcgaggtgatcacgccgacgatcccgccgatctcctgggagcgctggcccagggtattgatcaccgtggccgtgctgttgagcgcttcagcgatgtgctccagggacgacgacgcctcttgcatcgagttgcgcccgatgcgggtttgctgggcgttttcctgggccaggcgttcggtgctgcccatgttgtcggcgatgttcagcgaggtggcactgaactcttccaccgcgccggccatgctggtgatctcgccggactgctgctccatgccttcataggcgccaccggacaaaccggacagcgcctgggcacggctgttgacctcttcggccgccttgcggatatgcgagaccatggtcgacagcgcttcacccatctggttgaaactgcgcgccagttggccgatttcgtcatggctggacacgttcaagcgtgcgctcaagtcgcccgcgcccaaggcttcggcctggcgcaccaggtctcccaacggcgccagcttgctgcgcagcagccacaccgttgcaccgaccgccagcagcatggccagcacgctgccgatcaccaggcggataccgacgtcccacgtcaccgagcggatttcggccttgggcatgctcgcgaccacggcccacggcccgccttcgaaaggcaccgacacgctgtagaagtcttcgttcttgtctgcccagaaaccccctgtacccggcgtcttggccaggtccagcatcacgggaatggcttgatccagcgcctgcacgcccgccggcggtaccagccagcgcttctgctcatccagcaaggcgagggagccggtctggccgatgcggaaacgcttgaggttctcgaactgggcattctgcgcatcggtgtagtcgaacccgatgaacaacaccgcgatcacctgcccactgctgtcgcgcaccgggctgtactgggtcatgtaggagcggtcgaacagcaccgcgcggccgatataggtctgcccgccgagcacccgctggtaagccgggccctggcgatccagcaccgtgccgatggcgcggttgccgtcctgcttggtcaacgaggtgctgatacggataaagtcttcgccgctgcgcacgaataccgtggccacgccgccggacatctgcttgaactcatccacttcattgaagttgttgttcaacacctgattgcccaggtacaagcttggggtctgcacaccggccacggtcacaagctggtccgcatgcacgctcaagccagcgccgaagcgcttttcaaacagcccgctcaaacgctgggtactttcgcgcaaggtgctgtggaaggtgttgagttggtcggcgagcaaacgtgcctcgctggccaggtgctcctcgcgggtagcgaggttggcggagtcgagggaacgcaaggcaaacacggtgctgccgctgatgacgacagccagaatcacggctaatgccaggcctaactgggaggctatccgggcgcgaggttgagacatgacggctcctggccgaggccaggatcatcctgatctcatagcgctgctcggcaaattatctggtgggaaacgttggtgcacgatggttccaacacacctacttcggcgggctgaagcaatacttgagcgattcacaggggtatcacgcaaacgattgcacaaacggtcagcgactcctcaatcgaggcgttcgacctggggcagttccatggccttgacttccgcctgcagaaactccgccaagcgccgcaaacgctcaccgccggggcgggttttcggccataccaggtagtagttttcgccactggccaccgccgttggccaaggcaggctcaggcgcccctgggccacgtcttcggccaccatcagcaagtcgcccatggaaacaccgtaaccccgcgcagcggcgatcatgcccagttcgagagtatcgaacacctggccgcccttgagcgacacctgggacgccaaccccatgcgttgcagccaattgcgccagtcgcgacggtcgggcgtggggtgcaacagttcggcggtggccaggcgcgcagcatcccacggcccatcctccaacaggttcggtgcacctaccgggatcagcagttccgggaacaggtagctggcctcccaatccgccgggaagtgcccgtagctcagcaacaccgcgcagtcgaacggctcctgattgaagtccacctcgtccacgctcatccacgcgctggtcagttgcacttcattgcccggctgcaacgcccggaaacggctcagccgcgccagcagccagcgcatggtcagggtagacggcgccttcatgcgcaggatgtcgtcttcggcgttcagggtatggcaggcccgttccagcgcggcgaaaccttcgcgcacgcccggcaagagcaggcgcgccgcttcggtgagctgcaaggtgcggccgctacgctggaacaggcgacaggcgaaatgctcttccagcgtgcggatatgccggctcaccgcactttgcgtgatggagagctcctccgctgcccgggtgaaggaattgtgccgcgaggcggcctcgaatgcgcgcaaggcatacagcggggcaagacgtcgagacatcggcagattcctacagagcaataccgcaccctaccagatcagcaggcatgagtttaagtcatgtacatcatcgctttaatccttttgtgtaatgaaccgagagcgccgagaatcaagccttcccaaccttctgacttttcgagcgtgatgatcatgcaacatccggcacgtaccgaactctgggccattctgcggctgtcagggccgttgattgcctcacagttggcgcacatgctgatggtgctgaccgacaccctgatgatggcgcgcctgagccccgaagccctggccggtggcggcctgggcgcggcgacctactcgttcgtggcgattttctgcatcggcgtgattgccgccgtgggcactctggtggccatccgtcacggcgcgggcgatatcgaaggcgccacccgcctgacccaggccgggctatggctggcgtggctgatggccctggcggccggtttgctgctgtggaatctcaagcctgtgctgctgatgtttggccagaccgagaccaacgtgcactcggccgggcaattcctgacgatcttgcccttcgccctgcccggttacctgagtttcatggccctgcgcggcttcaccagcgcaatcggcaaggcgacgccggtgatggtgatcagccttggcggtacggtaatcaactacctgctcaaccacgcgctgatcgaaggcatgttcggcctgcccaagcttggcctgatgggcatcggcctggtcacagccatcgtcgccaacggcatggcgctgacgctgatgtggtacatccgcagcaaccgcacctatgcggcctacccactgagtaccggcctgctgcgcctcaacacccagtacctgcgcgagttgtggcgcctgggcctgccgatcggcggcacctatgcggtggaggtcgggctgttcgcgtttgcggcactgtgcatgggcaccatgggcagcacgcagttggccgcgcaccagatcgcattgcagatcgtctcggtggcgttcatggtgccggcggggatgtcctacgcggtgaccatgcgcatcggccagcactacggcgccgggcagttgctgcatgcgcgcctggccggtcgtgtcggcattggctttggcgcggcgatcatgctgggatttgctggcgtgttgtggctctattccgacccgctgatcggactgctcatcgaccacaacgacccggcgttccacgacgtgatcgtcctggccgtcagcctgctggccgtcgccgcctggttcgaactgttcgatggcgtgcagacaatcgccatgggctgcattcgcgggctcaaggacgccaagaccaccttcctgatcggcgcaggttgctattggttgattggcgcaccgtcggcctggctgatggccttcaccctgggctggggaccgaccggcgtgtggtggggcctggcgttgggcctggcgtgcgcggcggtgagcctgacctgggcgtttgaggcaaagatgaagcggatgcttcgccaggagcctgaacctcaaggctcattccaagccgaggccctgcacgattaacaatgtgggagggggcttgcccccgattgcggcgtgcccgtcactggttttttgactgacccaccgcaatcggaggcaagcctcctcccactttttgattggattgccacctcagcccagcagcgcttgctggcttttgccgaaagtcaggtactccaccaactccggcaacggcagcggcttgctgatcaggtaaccctgggcctggtcgcagccaaacaaacgcagcagcgccagttgctcaggcgtttcaacaccttcggccaccacttccaggttgaggttgtgcgccaggttgatcatggcatgcaccagcttgcggttttcttcgcgctcctccataccgccaacaaagctcttgtcgatcttcaacaaggcaatcggcaggctgttgaggtgcacgaacgatgagaagcccgtaccgaagtcatccagggaaaaccgcacacccaggcggccgagggcatccatggtctgcttgaccaggtcactgcggcgcatcacggcggtttcggtcagctcgaactccagccattgcgcctccacgccccgctcggcaatcagccgactgagggtcgagagcaactgactgtcctggaactggcggaacgagaggttgaccgccatgtgcaacggcggcaggccacgttcgcgcaggtcttgcatgtcgcgcagggcccgggagatcacccagtagcccagcggcacgatcaggccgctttgctcggccagtggcacgaactcactcggcggcaacaggccgcgctcgccatggcgccagcgcaccagggcttccaggccgacgatatggccgtcgtccaggtccaggcgcggctggtaatgcagctccagttcgtcacggcgcaaggcgcggcgcagctcgctttccaggtcggcgaggctgcgcgcgttgcggttgatacgttcgttgaagatatgaaaagtgcagccctgggtgctcttggcctgctgcatggcgatatgagcgtgccacatcagcgggtcggcaccggcacgggccctggcatgggccacgcccaggctacaaccgatcagcaggctttcgccatccacccaatagggctcggccatgacttcggtgatgcgctcggccatccactcggcacgctggggcgcacgacgggtgtcgatcagcagggcgaattcatcgctgcccaggcgcgccagttggtcgccgacctcgagctggctcttgagccgcgacaccacttgcaggatcaaccggtcgccggcctggtggccgagggcatcgttggcgtggcggaagttgtcgaggtccaagtggccgagggccaggccacggccttcattctcggccaggcgcgcggtcaacagggtctggaagccctggcggttggcaatgccggtgagcgggtcctgttcagccaggcgttgcagggtgttttccagcaccccacgctcgcggacgtggcgcaggcagcggcgcactgtatcggcatccaatacatcacgcaccagccaatcgctgacgccaagcggcgaaaccagcggttcctgttccagcaacaacacgcacggcaggctgcaacggccaggcccgggttgcaggccgggcgtggtcaagagtacggcgctgtggtcgtcatcgaacagacggctcacggattcccagtttggtgcgctgatcagcacagccccatcgcccatcggcgccaggcactcgcgcaataacgctgcccacgcgggctcatcggccagcagcagcaaacgcaagggttcgacaggcgtagacaagctagctccctagactctgcaaaaattcgtggcgacgcgcattatgacgtgcggcctgagaatcaccaatgataggggttatcaaacacgcgaactgtgaacattagcctcaaaacaaccctcacatcctgcggcaaagtatcaaaaccggcaaatttagatcgagtggtacgtcacactgtcgttctgacagagcagaatcctgccagcctgttaaaatgcccgcccttttgaacaacgactccctgaattctgtatgtcccgactcaatccccggcagcaagaagccgtgaactacgtcggcggccctctattggtgctcgccggcgcaggctccggcaagaccagcgtgatcacccgcaagatcgcgcacctgatccagcagtgcggcatccgcgcccagtacatcgtcgccatgaccttcaccaacaaggctgcgcgggaaatgaaagagcgcgtcggcaccctgctcaagggtggcgaaggccgtggcctcaccgtgtgtaccttccacaacctgggcctgaacatcatccgcaaggagcatgcgcggctgggctacaagccgggcttctcgatcttcgacgagaccgacgtgaagtcgctgatgaccgacatcatgcaaaaggaatacgcaggcgacgatggcgtggacgagatcaagaacatgatcggcgcctggaaaaacgacctgatcctgccgccccaggccctggaaaatgcacgcaaccccaaggaacagactgccgccatcgtctacacccactaccagcgcacgctcaaggcgttcaacgcggtggacttcgacgacctgatcctgctgccggtaaagctgttcgaggaacacgccgacatcctcgaaaaatggcagaacaaggtgcgctacctgctggtggacgaataccaggacaccaacgccagccaatacctgctggtaaaaatgctgatcggcaagcgcaaccagttcaccgtggtcggcgacgacgaccagtcgatctacgcctggcgtggcgcccgcccggaaaacctgatgctgctcaaggacgactacccgtccctgaaagtggtgatgctggagcagaactaccgctccaccagccgcatcctgcgctgcgccaacgtgctgatctcgaacaacccccacgaatttgaaaaacaactgtggagcgagatgggccacggcgatgagatccgcgtgatccgctgccgtaacgaagacgccgaagccgagcgcgtggccgtcgagatcctcagcctgcacctgcgcaccgaccggccctatagcgatttcgcgatcctctatcgcggcaactaccaggccaagctgatcgaactgaaattgcagcaccaccaggtgccgtatcgcctgtcgggcggcaacagctttttcggacgccaggaagtaaaagatctgatggcctacttccgcctgatcgtgaacccggacgacgacaacgccttcctgcgcgtaatcaacgtgccgcgccgcgaaatcggttccaccaccctggaaaagctcggcaactacgccactgaacgcaagatctcgatgtacgccgccaccgacgaaatcggcctgggcgaacacctggactcgcgcttcaccgatcgcctgtcgcgcttcaagcgcttcatggacaaggtgcgcgagcagtgcgccggcgaagacccgatcagcgcgctgcgcagcatggtcatggacatcgactacgaaaactggctgcgcaccaacagttccagcgacaaggccgcggattaccgcatgagcaacgtctggttcctgatcgaagcgctgaagaacaccctggaaaaagacgaagacggcgagatgaccgtcgaagacgccatcggcaagctggtgctgcgcgacatgctcgaacgccagcaggaagaggaagacggcgccgaaggtgtacagatgatgaccttgcatgcgtccaagggcctggaattcccctacgtgttcatcatgggcatggaagaggaaatcctcccgcaccgctccagcatcgaagccgacaccatcgaagaagaacgccgcctggcctacgtgggcattacccgcgcgcgtcagaccctggccttcacctttgccgccaagcgcaaacagtacggcgaaatcatcgattgtgcccccagccggttcttggatgaactgccgccggatgacctggcctgggaaggcaatgacgacaccccgaccgaggtgaaggccgttcgcggcaacaccgccttggcggacatacgcgcgatgttaaagcgctagaatcgactacttttcaatctactttcggcgcacaccgcgtcattagaggaagctttccgtggaagcactgcacaagaaaattcgcgaagaaggcatcgtgctttccgatcaggtactcaaggttgacgcctttctgaaccaccagatcgacccggcgctgatgaagctgatcggcgacgaattcgccgcactgttcaaggactcgggcatcaccaagatcgtcactatcgaagcatcgggcatcgcaccggcgatcatgaccggcctgaacctgggtgtaccggtgatcttcgcgcgcaagcaacagtccctgaccctgacggaaaacctgctgtcggcaacggtgtattccttcaccaagaaagtcgaaagcaccgtggcaatctccccgcgccacctgaccagcagcgaccgggtgctggtgatcgatgactttttggccaacggcaaggcgtcccaggcgctgatctcgatcatcaagcaggccggcgcgaccgtcgccggtttggggatcgtgatcgagaagtcgttccagggtgggcgtgcggaattggatgcacagggttatcgggttgagtcgctggcgcgggtcaagtcgctggaaggtggcgtcgttaccttcatcgaataacccctgccttaaagtggttgtaacagtgggagggggcttgccccctcccacattgaccctgtgttgcctgtcagtgcgcggtggcctgtaggccggcgagtaggagccgctggtacagatcctctttcagcccctccggcttacctaaccgcatccgctccagatgcttgggaaacacctccggttccggcgcatccaacgccgccttgcccagctccagaatctccgtcagcttgaatttgctcttgagccagttcagcgcccgcaacaaatcccgttcttcatcagtgaaatcactgcccagcggatactccggaaacaaccgacgatggcgtgcctgaatcccctgcaagcgctccggcgtgttatcggcaaagcgcggatccagctggaaatccttgggcagcttgccggccttttgcgcctccttgatcaaatcgtcctggaagcgtgagtcggtgatattgagcaacgcctcgatcaccttggcatccgtctgcccgcgcaagtctgcaatgccatattcggtgatgacaatatcccgcagatgccggggaatggtgcagtggccgtagtcccagacgatattggaactgacctcccccgctgactcgcgccaactgcgcaaaatcagaatcgaccgcgcaccttccagcgcatggccttgggccacaaagttgtactgcccgcccacaccactgagcacacgaccgtcttccaactggtcggccacgcccgcgccgagcagcgtcaccatgatcgcgctgttgataaaccgcgcatccaaccgctgcaggcgcttgagttcttcctggccgtacagctcgttgatgtagctgatgcgggtcatgttgaattcgaggcgcttggcgtgagtcatttcctgcaggcgctggtagaaactgcgcgggccaagaaaaaaaccgccgtggatcgaaatgccgtcgggctgcgccgcatcgtcgagcgtgccggcgttggcctgctgttgcgtggccacatccgggtagaccttgcgacggataatccccgcgtccgccagtaccaacaggccgttgacgaacatttcgctgcacccgtaaagcccccgggcgaaggggtcgacaccgccttcacggctgatcagcggtgcccactggtacacgtccaggtcggtcagcagcgagcgataggactcattgtcggcctggcgcgccagcaacgcggcggtcagcgcatcccccatggagccgatgccgatctgcaaggtgccgccatcgcgcaccagggtgctggcatgcaagccgataaaatggtcctggaaacccaccggcatattcggcgtggagaacaacgtggtgctgtctttttcatcgatcaggtaatcgaaggcatccatgcccagctcagagtcgccgggcatatagggcaaatcgctgtggacctggccaacgatcagcacggtttcaccggcatcacggcgcttggcgatcatcggcaacaggtcgagggtgatatccgggttgcagctcaggctcaggcgatccggatgttcgctgctgctggcgaccagttgcgccaccaggttcaagcccgctgcgttgatgtcgcgagcggcgtggctgtagttgctgctgacgtaatcctgctgcgccgactcgctgtgcagcaagctgcccggctgcatgaagaactgctgcacatggatatttttcggaaggctgtcgttgtgcaggtcggcgaggaaatccagctcggggtaatcgccgaacacccgctcgataaagggttcgagaaagcgtttctgcaaaccatcgcccatcgtcgggcggcccaggctcaacgcggtatagatggtcagcgcccgctccggcaacttggcgatgcgccggtacaaggcattggcaaaccggttcggcttgcctagcccgaggggcatgcccatgtggatatgcgccggcaaccgcgccagtacgtcgtcaactgcttgctcgattgaacacaactgcaccatccgaccctcctgaacattccatgattaggggttggaccgagcttgccgggtctttgctgcaatgaacagcgctgaaacaccaatcccaggcacaaaaaagccgctcgtaagcggcatttttgacgaagatcggcggatcagaggccagacatcttcttgattgcacccttgaggtcatcatccgagcaatcggcacaggtgccttttggcggcatcgcgttgataccggtgatcgccttggccaggatgccgtcaaggccgccctggtgatcggcgcgttctttccaggccgctgtgtcgccgattttcggcgcgcccaacaagccggtgccgtggcaagcgttgcagtgcttggcgatgatgtcatctggcgtcttcgcagcgccgccgcctgcggcgaccgccacctccatgcccttgcattcctggccctggacgcagacctggccgacaggctccaggcgcttggcaatatcatcattggtcgcagcttgagcgctgacagcccatagggccagtacggttgctggtgcagccagcattttcataattaggttcacgcgttcaccctcaatggtggctattcacgcctgcggccacggtttcgcaggcggcgaaagtataacggttagcccgcctggccgaaacaaccctattaaataaagggagattcgacctcacggaatacagctcgggtgcctctgcgacgctggcaggacgcctcttttcttaaaagttcgcgggtgtggctgcgctgattagtcgcgccggcacgtcgaacggattgcgaaaacgatggggcttggtgctttcaaagtagtagctatcgcccgcttcgagcacaaaagtttcaagaccgaccaccaactccaggcgaccttccaccagaatcccggtttcttcgccttcgtgggtgagcatttcttcgcctgtgtcggcgcccggcgggtagatttcgttgagaaacgcaatcgcccggctggggtgcgcccgtcctaccagtttcatggtgacggcgccgtcggagatgtcgatcagctcattggctttatagacgatctgcgtcggtatttcctggaggatctcctcggaaaagaactcgaccatcgacatggggatgccgcccagcaccttgcgcaaggagctgatcgaggggctgacgctgtttttttcgatcatcgaaatggtgctgttggtgacacccgcacgcttggcgagctcgcgctgggaaagacccttcagtttacggatggattgcagtcgttcgccgacgtccaatgcaggagcctcctaggattcaggctttgttgtaattgagcgttatcatggcgacagcgttcagtatttacaacacttgggcctaaatcccgggcggttgcgttcgtgcctggcgatcaagccccggaatagagccttggcacgcggcgcaggttgcagaacagctgataggggatggtctcggcggcaaccgcgacgtcactggcgaggatatgtttaccccatagctccacggtggaaccaaggccggcttgcggcacgtccgtgaggtcgatgcacagcatgtccatggacacacggcccagcaattggctgcgttgaccggccaccagcaccggcgtaccggtcggcgcgtgtcgtggatagccatcggcataacccatggcaactacaccgatacgcatgggtttcggtgtgatgaacttggcgccgtaacccaccggctcccccgccggcagttcacgcacgcagatcaccttggactccagggtcatcaccggctgcaagcgcgcagccacggcctggtcttcgccaaacggtgtagcgccgtaaagcatgatgccgggacgcacccaatcgctggacacagccggccagcccatcaccgacggcgaattgcgcaggctgacctcggccgccaagccctggcgcgccgcgtcaaacaccgccacctgttcatcgctgcgcacgcagtcgagttcatcggcacgcgcgaaatggctcatcaaaacgatcttggccactttgccgctggccagcaggcgctggtaagcctcgtggtaatccttcggatgcaggccgacacggtgcatgcccgaatcgagcttgagccagacagtcagcggcttgctcagtacggcctgttcgatggcctccagttgccacagcgaatgcaccacgcaccagaaatcatgctcgatgatcagcggcagctcgtccgcctcgaagaaaccttccagcaacagcacgggtgcacgaataccggcggcgcgcagctccaatgcctcctcgatgcaggccacggcaaacccgtccgcctcggcttccaacgcttgggcgacgcgcacggcaccatgcccgtaggcatcggccttgatcacggcaagggccttggcccccgtgacttcacgggccaattggtagttgtggcgcagggcttggaggtcgatcagggcacgggcaggacgcatggcggcaggcttctaggcggcaaagtgaagaaaaaccggcaccgacagacagcatcggcaccgggagagggatcggtgattaaggcagcgcggccacaacggacagctccaccaggatttgcggttcgcacagcttggcttcaaccgtggcacgggccggggcgacacccttgggcagccacttgtcccacaccgcgttcatgccggcgaaatccgcgtcgatgtctttcaggtagatcgtcaccgacagcagcttgctcttgtcggtgccggccaggtcgagcaaacgctcgatattggccagggtttcacgggtttgctgttcaatcccggcgttcatgtcgtcaccgacttgccccgccagatacacggtaccgctgtggacaacgatctggctcatgcgctcattggtgagctggcgctggattgacatgttgtgcggactcctggtggttgccataacgggaaatatcgaggccttcggcactgatctgcggggttttcttcgccatcaggtcggccagcaaacgaccggaaccacacgccatggtccaaccgagggtgccgtggccggtattcaggaacaggttcttgaacggggtggcaccgacaatcggagtgccatcgggggtggtcggacgcaggccggtccagaaactggcttcggtcaaatcgccgccctgaggataaaggtcgttgacgatcatctccagggtttcacgccgacgcgggttaagcgacaggtcaaaaccggctatttcagccatgccaccgacgcggatgcggttgtcgaaacgggtgattgcgaccttgtaggtctcgtcgagaatcgtcgaagtcggcgccatcgccgggttggtgatcggtacggtcagcgaatagcccttgagcgggtacaccggcgccttgatccccagcggcttgagcagcttcggcgagtagctgccgagggccagcacgtaacggtcggcggtctccagcgtgccgtcgatccacacgccgctgatgcgatcaccggcgtagtcgagacgctggatatcctgttcgaagcgaaattgcacgcccagttgcttgcacatgtcggccaggcgggtggtgaacatctggcagtcaccagtctggtcgttcggcaggcgcagggcgccagcgagaatatccgtgacgctggccagggccggttcgacgcgggcgataccggcgcggtcgagcagctcgaacggcacgccggactccttcaacacggcgatgtccttggccgcgccatcgagctgcgcctgggtgcggaacaactgggtagtccccaggctgcggccttcgtaggcaatgccggtctcggcgcgcagttcgtcgaggcagtcacggctgtactcggacagacgcaccatgcgctccttgttcaccgcgtaacggctggcggtgcagttgcgcagcatctgcgccatccacaggtattggtcgatgtcggcggtggccttgatcgccagcggcgcatggcgttgcagcagccacttgatagctttgagcggcacgcccggcgcggcccatggcgaggcatagcccggggacacctggccggcgttggcgaaactggtttccatggcagcggcaggctgacggtcgaccacaaccacttcaaagccggcccgcgccaaatagtaggcactggtcacaccaatgacgccgctacccaagaccagaacgcgcatttttatatcctcatcgcgggcatggccgctgacgtgtgttattcgagcaatgatgagcgcagtgtaaaaaacaattgccagtgcatttcactatataactgcctatatttggcgacaattctcggcaaaaacccttttcacagaggcgtatcccctatgcgtaccaacacccagaccaagcgggagctggacaagatcgatcgcaacatcctgcgcatcctgcaaaccgacgggcgtatttcgttcacggagctgggggaaaaggtcgggctgtcgaccacgccctgtaccgagcgcgtgcgccggctggagcgtgaagggatcatcatgggctacaacgcgcggctcaacccccagcatttgaaggggagtttgctggtatttgtcgagatcagcctggattacaagtccggcgacaccttcgaggagttccgccgcgccgtactgaaactgccccatgtgctggagtgccacctggtttctggcgacttcgactacctggtgaaggcgcggatttccgagatggcgtcgtaccgcaaattgcttggcgacatcctgctcaagctgccccatgtacgggagtccaagagctatatcgtgatggaagaggtgaaagagagcctgaacctgccgatcccggactgacctgagacactcgggtcaacatgtgggagggggcttgccccctcccacatttggactgtgtaaaaccgctaaaccaacacctgccgggtgctcgccatgtagtcgtggatctgcttttccacccgtgggtgaatcagctccaccgggcgccgtccattcgggcacggaagggtcttggtggtgccgaacaacctgcagatcaacgggcgctcgtcgtacaccgtgcagccgttggggcccaagtgcacgcagttcagctcctccatggccgcgtcctgctcagccgcagtcttacgcggcaggcgcgacatttcctcgggcgaggtggttaccggcccacagcagtcgtggcaaccggggacgcactcgaacgaaggaatctgcctgcgcagggcgctgactttctgactgttgcaactcatcgaaacacgtaccgaacggcgaataggcgtggattctgccgcaaaacgccctgcgcagacagcttcgtccgaccgctgtatcctgcgtcaaattttccaaacagggatgctccccatgactgccagcgcccggcacaccgcttcctactacgccgccagcagcgtgccgcaacctgagtacccggtgttgaccggcgaactgaccgcggatgtgtgcgtggtcggcggcggtttctcggggctgaacaccgcgctggagttggccgagcgtggattcagcgtggtgttgctggaagcgcgcaagatcgcctggggcgccagcgggcgtaacggcggccaactgattcgcggcgtcggccatggcctggaccagttcgccaacgtgatcggcaccgagggcgtacgccagatgaagctgatgggcctggaggcggtggagattgtgcgtgagcgcgtcgagcgctaccagatcccctgcgacctggcctggggctactgcgacctcgccaacaaaccccgcgacctgcacggcctggccgaagatgccgaagaactgcgcagccttggctatcgtcacgacatacgcctgctgcaagccaacgaaatgcccagcgtgattggctccgaccgctacgtgggcggcatgatcgacatgggctccggccacctgcacccgctgaacctggctctcggcgaagccgccgccgcgcagcatttgggcgtgaagctgttcgagcagtccgaagtcacgcgcatcgactacggccccgaagtcagcgtacacaccgcccaaggcaacgtgcgcgccaagactctggtgctggcctgcaatgcctacctcaatggcctcaacccgcacctcagcggcaaggtgctgcccgccggcagctacatcatcgccaccgagccgttgagcgcagcccaggccgccaacctgctgccgcagaacatggcggtgtgcgaccagcgtgtcacggtggattacttccggctgtcagccgaccgccgcctgctgttcggcggtgcctgccactattccggtcgcgaccccaaggatatcggcgcctatatgcgcccgaaaatgctgcaggtattcccccagttggccgacgtaaaaatcgatttccagtggggcggcatgatcggcatcggcgccaaccgtttgccgcagattggccgcctggccgaccaacccaacgtgtattacgcccaggcctacgctggccatggcctcaacgccacgcacctggcgggcaagttgctggccgaagccatcagcggccagcaacagggccgcttcgacctgttcgcccaggtgccgcacatcaccttccccggcggcaagcacctgcgctcgccgctgtaggcgctgggcatgctctggcaccgcctcaaagagctggtctgatcaatcgcgccagaacggtttcagcccctcgtcgcgtgcctgctcagcggtcagcccgacgtcgcgcaattgctccctggtcaggtgcaataaagccttgcgcgtgtggcgacggtgccagaacagaccccagcgactgatatcgcgcggcgccgtcgcccgctcctgcccagcctccagttcctgactgtgtaacgccagccgcacatcgctcatgccgttcattttgctgcccctcagttgcttgttgccttgagtgaccagcatgagcgcgcggccaaaaccattacagattcaaccctgccttattaaatccatacagatgctgcctttggacggctgaatcctgtattttctgcctatctgtaatggtcactcgggagcgaccgccatgaccctgtacataaacctcgccgaattgctgggtacccgcatcgaacaaggtttctatcgccccggtgatcgactgccttctgtacgggccttgagcgtggaacatggggtcagcctgagcaccgtgcagcaggcttatcggttgctggaagacaacggcctggcgatgcccaagccgaaatccggctacttcgtacccgtcggccgcgagttaccggccctgcccgaagtcggtcgtccggctcagcgccccgtggacatttcccaatgggaccaggtgctggagttgatacgcgcaacgccgcgcaaggatgtcatacagatgggtcgcggcatgccggatgtattgtcgcctaccttgaaacccctgttgcgcagcctggcgcgcgtgagtcgccgccaggatctgccgggcctgtattacgacaacatcctcggctgtatggagctgcgcgagcaaattgcgcgtctgtccctggattccggctgccaactgacggccgaggacatcgtgatcaccaccggctgccatgaggcgttgtctgccagcatccatgccatctgtgagccgggcgatatcgttgcggtggactcaccgagctttcacggcgccatgcagacgctcaagggcctgggcatgaaagccctggaaatccctaccgacccgatcaccggcatcagcctcgaagcgttggagctggcgctggaacagtggccgatcaaagtcatccagcttacccccaactgcaacaaccccctgggctacatcatgccggaggcgcgcaagcgggcgttgctcaccttggcacagcgcttcgacgtggcgatcatcgaagacgatgtctacggcgaactggccttcagctacccgcgcccgcgcaccatcaagtcgttcgacgaagatggccgtgtgctgctgtgcagctcgttttcgaaaaccctggcacccggtttgcgcattggctgggtggcaccgggccgatacctggaacgggtgctgcacatgaaatacatcagcaccggctccacagcgactcaaccgcagattgccatagccgagtttctcaaagggggccacttcgaaccgcatttgcggcggatgcgcactcaataccagcgcaatcgcgacttgatgctcgattgggtcagccgctacttcccgacgggcacccgtgccagccggccacaaggcagcttcatgctgtggatcgaactgccggaaggttttgatacgttgaagctcaaccgcgtcctcgtggaacaaggcgtgcaagtagcggtaggcagtatcttttccgcttccggcaaataccggaactgcctgcgcatgaactacgctgccaagccaaccgcgcagattgaagaggccgtgcgcaaggtcggggctgcggcgatcaagatgctggcggagacggccgactgacctttaccggaaatttgccgtcatatgccgacaaccgccctgatctggaagccgatcccttgatgattcaacggctattaccgttttgcctgttaggggccctggccctgggcggctgcgccagcgtgagcacgccgcgcgtccccagcgacgccctgcctgccgcgcaatcgtcgttcggccgctcgatccaggcccaggccgcgccctatcaggggcgctcgggctttcgcctgctgcccaacagcagcgaggcgttcatggcccgcgccgagctgatccgcaacgcccagaccagcctcgacctgcagtactacatcgtgcacgacggcatcagcacccgcatgctggtggacgaactgctcaaggccgccgaccgtggcgtgcgcgtgcgcatcctgctggacgacaccaccagcgacggcctcgaccagatcatcgccaccctcgcggcccaccccaagatcgagatccgtctgttcaacccgttgcacctggggcgcagcaccggcgtgacgcgggccatgggccgcctgttcaacctgtcgctgcaacatcgacgcatgcacaacaagctgtggctggcggacaacagcgtggctatcgtcggcggacgcaacctgggggatgagtatttcgatgccgagcccaacctgaacttcaccgatatcgacatgctcagcgtgggcccggtggccgagcaactgggtcacagtttcgaccagtactggaacagcgcgctgagcaagcctatcgatgacttcatctccaacgcgccgtccaagggcgacctcgccgccgcgcgcgtaagcctggaagcctccctggccgagtcgcgccagcagaaccacgcgttgtacaaccgcctgcgtacctacaagacccaaccgcgcatggacacctggcgccgcgagctgatctgggcctggaaccaggcgctgtgggatgcgccgagcaaggtgctggccaaggccgacccagaccctcggctgctgctcacaacccaactggcgccggagctggagggggtcaatcacgagctaatgatgatttctgcgtacttcgtgccgggacagccaggcctggtgtatctgaccgggcgcgccgatgcgggcgtgtcggtgagcctgctgaccaattccctggaagccaccgatgtgcccgccgtacacggcggttacgccccctaccgcaaggcgctgctggagcatggggtgaagctctacgagctgcgccgccaacccggggatggcggcggcagtggcccgcacctgtttcgccgaggcactttccggggctcggattccagcctgcacagcaaggcgatcatctttgatcgggagaaatcctttatcggctcgttcaacttcgacccacgctcggtgctgtggaacaccgaagtcggtgtgctggtcgacagccccgagctggcggaacatgtacgcaacctggcactgcaaggcatggcgcccgccctgagctatgaagcgaaattgcaggacggccaggtcgtgtgggtgaccgaagataacggccagttgcacaccctgacccgcgagcccgggagctggtggcgacggttcaatgcgtggtttgccaccagtgttggccttgagcgcatgctctaggccgcttgtgccgcaccgaatgcgccctggcgcagcagcaacatcaccaggccaagcgcaccggccgccatcagcagcggcagcgcatgcccgctgatccactggctacccgcccctgccaccaatgggccgatcaggcagccgataccccacagctgcgccacgtgggcattggcgcgcaccagcgcgtcgtcgcggtaacgctcgccgatcaagatcaacgacagggtgaacaagccgccagcacttgcgccgaacacgacccagatcggccagatcattggcgtgtgcatcaataacggaatcgccaggctcgacaccagcaacagcagcgcacaccccaggaacaacgtgcgccgcggcaagtagtcggccagtgcaccgatgggcaattgcagtaatgcgtcgccaaccaccaccgtgctgaccatggccaaggcgatctcggcggtgaacccttgttgcaggcagtacaccggcaacaacgtcaggatcatcgcctcgaacgcagcgaacagcgccaccgcccaggcaatcgctggcaggctccggcagaagcgccacagttgcgcgaacgtcacgctgaaggattcggcgctcggtgcaccggaacgtcccagcagcaacagcggcgcaaccatcaacaggccgacacccacccagaaaccgtagtcatgatcggtgccgatcaagcctaacagtaacggacccgacagctggctcaaggcatagctgcagccgtacagcgccaccagccggccgcgccactgctccacaaccaactggttgatccaactctcgccgaggataaacacgatggtcaggatcacgccgatcatcaggcgcagcaccagccacaccgggtagctgggcaggatcgccagcaggccgatggacaccgcgcccgcccacaggcacaggcgcataaggttggcggtgccaagccatgaggccaggcgactggaaaccttcgcgccgagcaatacgccaaaggccggcatcgctgccatcacgccaatcgcgaaactgccgtagccccagctttccaggcgcaaggacaccagcggcatgctgacgcccagggccaggccgacgctgagcaccgaggccaggacggcgaaataagtcgcccaacgcatttccacgctcctgtggatcatttttaagttcacacaaaccagtgtgggagggggcttgcccccgattgcggtgggtcagtgagcaccgctggcgcctgacacactgctatcggggggcaagccccctcccacatttaacctgcggtgctgcttagagcttgatccaggtcgccttcaactcggtgtatttgtcgaacgcatgcagcgacttgtcacgaccgttgcccgactgcttgaagccaccaaacggtgcggtcatgtcgccgccatcgtattggttgacccacacgctaccggcgcgcagggccttggcggtcaggtgcgccttggagatgtccgccgtccacactgccgcggccaggccgtagatggtgtcgttagcaatggcgacagcctcttcggcgctgtcgaaggtgatcaccgacaggactgggccgaagatttcttccttggcgatcttcatcgcattggtcacgccatcgaaaattgtcggctcaacataggtgccgccggtttcttccagggtgcgcttgccgccggcgaccaacttggcgccgtcggcatggccggcttcgatgtacgagagcactgtgttcatctgctgggtgtccaccagtgcaccgacgttggtcgcagggtccagcgggttgcctggtttccagcccttgagggcctcgatcaccagcggcaggaatttgtccttgatggagcgctccaccagcaggcgggaaccggcggtgcagacctcgccctggttgaaggcgatggcgccggcggcagactcggcagcggcttgcaggtccggagcatcggcgaacacgatgttcgggctcttgccgcccgcttccagccagacacgcttcatgttcgattcgccagagcggatcaacagttgcttggcaatcttggtggagccggtgaacaccagggtgtcgacgtccatgtgcagcgccagcgcgttgcccacggtatggccgtagcctggcagtacgttgaatacaccttgtggaataccggcttcaacggccagtgccgcgatgcggatggcggtcagcggggatttttcggacggcttgaggatcaccgagttaccggtggacagcgcaggccccagcttccagcaggccatcatcaacgggaagttccacggcacgatggcgccgacaacacccacgggctcacgggtcaccaggcccaattggtcgtgcggggtcgcggcgacttcgtcgtaaatcttgtcgatggcctcgccgctccagctcagggcattcgccgcgccgggtacgtcgatgttcagggagtcgctgatcggcttgcccatgtccagggtttcgagcagcgccagttcttcggcattggccttgagcaacgcagcaaaacggatcatggcggatttgcgcttggccggcgccaggcgcgaccacacgccggaattgaaggtggcgcgggcgttttcaacggcgcgttgggcgtcggcggcgtcacagctggcaacagtggccagcaggcgaccatcgaccgggctgatgcattcgaaggtgtcaccggaaacagcggcggtgtactcgccattgatgtaggcgcggccttcgatcttcagatccttggcacgttgttcccagtcggcacgggtcagggtggtcatgcgagtgtcctcctcttattgaatacaagggccacgggatatcccacagcagccttaaagaattcttgcccgccagccaatggttcggcgcaaggcagctgccaccctaaaccagcggctgggggtgtttcaatatatttgacataacgccggcaaacgcccttgcgatgttcattttaataaacatagactttgggctctccaaccgcaggccagacgggacacgcacatgagcatccaggacatcgtcgacttcagccaagccaagaccgccgccgagcgctaccgccctgccgccgagaaaatcctcaagggcgatcccgagcaaacgatctacaaccactacaacagcccctgcggccagatgagcgcgggcgtgtgggaaggtgaagtcgggcagtggacggtcaattacaccgagcatgaatactgcgaaattgtgcagggcgtgtccgtgctgcgtgatgccgacggcaacgccaagaccttgcgcgctggcgaccgcttcgtgattcccgccggtttcagcggcacctgggaagtgctggaggcgtgccgcaagatttacgtggtgtttgaacagaaggcctgatcaagacggcgggacgcggagcgtccgaggcgtcgttcccacgcagagcgtgggaacgatcaggcaaaaaaaagcccggatcgtgagatacgggctttttttcacaaggaggaaaatcaattacttgattttgccttctttgtagatcacgtgcttgcgaacgcgcgggtcgaacattttcttttcgagcttgtccggggtagtacgcttgttcttgtcggtagtgtagaagtgaccagtaccggcgctagagatcattcgaatcaattcacgcatgatatagctccttagattgtgccagcgcggcgcaattcagccagcacgacagtgatgccacgcttgtcgatgatgcgcatgcctttggcagatacgcgcagacggacgaaacgtttctcttcttcaacccagaagcggtgatgctgcaggttcggcaggaaacgacgacgggttttgttatttgcgtgggaaatgttattcccagtcaccggacccttaccggtaacttgacagactctcgacatgcctcagccctctaaaaccacatgcccaacccggcatgggttggccgcttaatctctcagtcatttggcgccaggcgccgcgtttctttagggtcttaccggctacacctacaagcgaaggaaccgggcccctagaaaagagcgctgctttataccagaaagaccccagtgcaacaacagcccgcgtgtttttactggcgtaaatcttggcggcagacgcctgaaccgttgccaggaggggccgctgtcacagccgaccgctcgtcgcacagaatgatttacagcgcgcgcgggcacagtgaagtgcacgacgaaacgcactgaggcgccatcaaaacagcatttggcgcaaaagcacaggcaaaaatgggctagtcatttacctatcagaccactacggtaggacttttccagactgcactcgcagatgggccttcgatctgcaaaggaaaccgaacatgcgcctcgctgccctaccgctattgctagcccctctctttatcgccccgctggcctctgccgccagcaccttgagcgtctgcaccgaggccagcccagaagggttcgatgtggtgcaatacaactcgctgaccaccaccaatgcctcggccgacgtgctgatgaaccgcctggtggactacgacgcgaccagcggcaagctggtgcccagcctggcggacagctgggacgtctcgccggatggcctgacctataccttcaagctgcacccggatgtgaaattccatcgcaccgagtacttcaccccaagccgcaccctgaccgccgaagacgtgcgtttcagcttcgagcgcatgctcgacccggccaacccctggcacaagatcgcccagagcggcttccctcacgcccagtcgctgcaactaccgacgctggtaaaaaagatcgacgctctcgacccactgaccgtacgtttcaccctggatcacgccgactccaccttcctcgccgcgctgagcatgggcttcgcgtcgatctacccggccgaatatgccgacaaactgctcaaggccggcacgccggagaaactcaacagccagccgatcggcactggaccgtttatcttcagccgtttccagaaagatgccgtggtgcgctacaaggccaacccggactacttcgccggtaaaccggctgtggataacttgatcttcgccatcacgccggacgccaacgtacgcctgcagaaactgcaccgcgacgagtgccagatagccctgtcgcccaagccgctggacgtgggtgaggccgaaaaggacccggcgctcaaggtggagaagaccgctgccttcatgaccgccttcgtggccatcaacagccagcacccgcccctggacaagcccgaagtccgccaggcgatcaacctggcgttcgacaaggggagctacctcaaggccgtgtttgaaggcaccgccgaggccgccaacggcccgtacccacccaacacctggagctacgccaaggacctgccgggttatccacaggacctcgccaaggccaaggcgctgctcgaccgcgccgggctcaaggacggcttcaagaccactctctggacccgccccaccggcagcctgctgaaccccaacccgaaccttggcgcacaactgctgcaggctgacctggccaaggtcggcatccaggccgagatccgcgtgatcgaatggggcgaactgatccgtcgcgccaaagccggcgaacacgacctgctcttcatgggctgggccggtgacaacggcgacccggataacttcctgaccccgcagttttcctgcgcggcggtgaaatcgggcaccaacttcgcccgctactgcgacccggcgctggacaagctgatcagcgcaggcaagaccaccagcgagcaaggcgtgcgcagcaagctgtaccaacaggcccaggcgcagatccagcaacaggcactgtggctgccactggcccacccgactgcatttgcgctggcccgcaaaaatgtcgtgggttatcaggtgagcccgttcggacgtcaggatttctcgaaggtcagcgtccagccctgagctgaaagctgcaagcccgcttgaggcttgcagctgctcccctcctacatccacccgtattccgccatcgacaacggatcgccatcccccacgataatgtgatccagcacccgcacgtccaccacttccagcgccttctgcagcaacttggtcaattttcgatcagcggcgctcggctccaggctcccggaaggatggttatggcacaggatcaacgccgccgcgttgtaggccaaagcgcgcttgaccacctgccggggatacaccatcgccgcgtcgatggtgccttgggacaacgcctcgaagcccagcaccctgtgccttgaatcaaggaacaggcagccgaagatctcatgaggctcatgacgcagcatggccttcaggtagtcccgcacggccaccgggctttccagcaccgagtcgcttcgcaggcgctcggccatgtgccgcttggccatttccagcaccgcctgtaactgggcaaacttcgccggccccaggcccaattgttggttgaacaatgtttggctggcctccagcaacgggcgcaatccaccgaattgcgccaaaagatggcgcgccaggtccaccgcgctcctgccggaaaccccggtacgcaggaagatcgccagcaactcggcatccgacaggctcgccgcgccccactccaaaagcttttcccgcggccgctctgccgccggccaatcacgaatactcatccctcctccctctccctgtatgccatgcgtatcgctgttgcctcgcggacgctgtgttatcgtaggccctcttttttgcaggcgatttcccctggggagggggcatcgcaggcgtcattgaactggcaacactgaactggaaaggcaaaccaatgcagcgtctgtatcggaaacgcatcgttctcggcgttggcggcggcattgccgcctacaagagcgcagagctggtccgcaggctcctggaccagggcgccgaagtgcgcgtggtcatgacgcgcggtggcagtgaattcatcaccccgctgaccatgcaggccttgtccgggcacccggttcacctggacctgctggaccctgcggccgaagccgccatgggtcacatcgagctggccaaatgggccgatctggtgctgatcgccccggccaccgccgacctgatcgcgcgcctggcccaaggcatcgccgatgacctgctgaccactctggtactcgccaccgacgccaccgtcgccatcgccccggccatgaaccaggccatgtggcgcgaccctgctacccaggccaacacccaacttctgcaaagccgaggcctcaaggtgttcggcccggcatccggcagccaggcctgcggcgacgttggcatgggccgcatgctcgaagccacagacctggcgctgtgcgccgccgagtgcttccagcacctggccctcaccggcaagcacgtgttgatcaccgccggcccgacccaggaaaacatcgacccggtgcgctacatcaccaaccatagctcaggaaaaatgggctttgccctggccgaagcggcggtcgaggcaggcgcacgcgtcaccctgatcaccggcccggtgcatttgccgaccccggatcgggtcacgcgaatcgacgtcgtcagcgcccgcgacatgctggcggcctgtgaggcagccattccgtgcgacctgttcatcgcctcggcggcggttgcggactaccgcccggaagtcgttgccccgcaaaagctcaagaaagaccctacgagcggagacggcctgctcctgcaaatggtgcgcaacccggacatcctggccaccatcgccacgcgcccggaccgtcctttcagcgtcggtttcgccgccgagaccgagcatttgctggactacgccgcacgcaaattgaaagacaagaacctcgacctgatcgttgccaatgatgtcgccaacccgagcatcggcttcaacagcgaggaaaacgcctgcagcgtgatcgaccgcgacctgcacgccacccttttcgcccagaccagcaagggcaagattgcccgccaactgatctcttttatcgcccaacggctgaaccaggtttaatttccatgcacgctttgcaagccaagatcctcgacccacgcatcggcagcgaattcccactgccggcctacgccaccccgggctccgcaggcctcgacctgcgcgccatgctcaagcaagacaccgtccttgaaccgggccagaccatcctgatccccaccgggctgtcgatctacgtgggtgaccctggcctggcggcgctgatcctgccgcgctcgggcctgggccacaaacatggcatcgtgctgggcaacctggtcggcctgatcgactcggactaccagggcgagttgatggtgtcgtgctggaaccgtggccagaccgcgttcaacatcgccgtcggcgagcgcattgcccagttggtattggtgccggtggtgcaggcgcacttcgaactggtcgaggagttcgatgaaacccaacgcggcgcaggcggttttgggcattccggcagccattgattgttcctacgcgcgtgcctcggtgctgccgttatgcttttaaggaacatgacggggattgcgctttatgacgaacgattcgcgaataaaacggcaccatgccgctggtcacgcctccatcacccataacagcttgaaacccgggctgttactggcggcaaccagcgtgatcgccgccggtgcgctgttctggtttggcgcgtgggtgccactgcacaacgaataccgccagcacgttgcgcaatccgccgctgcgattatcagcaagtccgtcgcaacggccgccgataaactcgcactgcaagccgagatcaacgccaaaaccccggcactcgcgaacgctgtccggtccaatcgaccggatatccggcaggccgcagaacaccatctacccgcacgggaggggttgaccagcacttggctcaccccccttcgccaagcgcccctgggcgatagcctgccgcctcaggtgctggacatgattggtcgcgcggagcgtaacgtgccgccaataccggaaatttacaaaagtggcgaccgttggcttttctatagcgtaattgccttgcgcgaagccacgcacgccccgatcatcggcaccctgacccaggcatacgacctccagccattgaccgaacaactggcgtcgctgcccccagaggtgggaacctttcgtttgtcccagcgcgtctggaacgatcccgagcaggtgatcttcacccagggccacagcgcgtcaccagacacctacacgcttgccgtaggcgataatcatctatcattgagcttcagccccggggcgctgtatcagttcgcttacccccgtcagcagcttgtgttgatggcgttggccgcgctacttgccctggtgggtgccatggcaggcgtatacctgtgcttcaggcggtcccaaatgttaatcaacaacggctgtggaataggtacagccccacgccacgaactctcctcccaaaatgccgtccaagccccaggcatgaccccactggtcagtccccaggatctttcaagacaggagcccccccaagccatgagcaatccagcccgtgtagccccgatcttccccgacagtatcttccgcgcttatgacatccgtggcgtggtgcccaaaaccctgaccgccgaaaccgcctactggattggccgggccattggcgcccagagcctggcccaggacgagcccaacgtgtcggtcggccgtgacggtcgcctgtccggcccggagttggtggaacaactgatccagggcctggccgacagcggttgccatgtgagcgacgtgggcctggtgccgacgccggcactgtactacgcagccaacgtactggctggcaagtccggggtgatgctcaccggcagccacaacccgtcggactacaacggtttcaagatcgtcatcgccggcgacacgctggccaacgaacagatccaggccctgcacgaccgcctgaaaaacaacgacctgaccagcggcaagggcaccgtcaccaaagtcgacatcctgcaacgctactctgatgaaatcaccggtgacgtcaaactcgcgcgccgcctcaaggtggtggtggattgcggcaacggcgcggcgggcgtgatcgccccgcagttgcttgaagcgctgaattgcgaagtgatcccgctgttctgcgaggtcgacggcaacttccccaaccaccacccggatccaggcaagccggagaacctggtggacctgatcgccaaggtcaaggaaaccggcgctgacgtgggcctggcctttgacggtgacggcgaccgagtgggcgtggtgactgaaaccggcgagatcgtgttcccggaccgcctgttgatgctgtttgcccgtgacgtggtggcgcgcaatgccaacgccgagatcatcttcgacgtgaagtgcactcgccgtctcaccccgctgatcaaggaatatggcggtcgcccgctaatgtggaagaccggtcactcgttgatcaaaaagaaaatgaaggaaaccggcgccctgttggccggcgaaatgagcggccacgtgttcttcaaggagcgctggttcggctttgacgacggtatttacagcgccgcgcggttgctggagatcctcagcaaggaaaaatctaccgcagaagagctgttccagaccttcccgaacgatatttctacgccagagatcaatatccatgtgaccgaggagagcaaattcagcatcattgacgcactgcacgatgcgcaatggggcgaaggcgccaacctgaccaccattgatggtgtgcgagtcgattacgccaaaggctggggcctggttcgcgcgtccaacaccacaccggtgctggtcctgcgtttcgaggcggataccgaggctgagttgcagcgcatcaaggacgtgttccacgcccagttgaaacgtgttgcccctgatctccaattaccgttctgattttttaccggagccctgaatgaccctcgaacgcgaagccgctgccaacactgccaaggtcctgtccgaagcgttgccttacatccgacgctatgtcggcaagacgctggtgatcaagtacggcggcaatgccatggaaagcgacgagctgaaaaccggctttgcccgcgacatcgtgttgatgaaagccgtggggatcaacccggtggtggtgcacggcggcggcccgcaaatcggcgacctgctcaagcgcctgtcgatcgagagtcacttcatcgatggcatgcgcgtcactgacgcgcagaccatggacgtggtggagatggtcctcggcggccaggtcaacaaagacatcgtcaacttgatcaaccgccacggcggcagcgccatcggcctgaccggcaaggacgcggagttgatccgcgcgaaaaagctgacggtgacccgtcagacaccggagatgacccagccggaaatcatcgacatcggccaggtgggcgaagtggttggcgtgaacaccgacctgctgaacctgctggtcaagggcgacttcatcccggtgatcgcgccgatcggcgtgggcgccaatggcgagtcctacaacatcaacgccgacctggtggccggcaaggtggccgaagcactgaaggctgaaaagctgatgctgctgaccaacatcgccggcctgatggacaagcaaggcaaagtcctgaccggcctgaccacccaacaagtggacgatctgatcgctgacggcactatctacggcggcatgctgcccaagatccgctgcgcgctggaagcggtgcaaggcggggtgggcagctcgttgatcatcgatggtcgagtgccgaatgcggtactgctggagatcttcacggataccggcatgggtacgttgatcagtaaccgcaaacggccttaagacaccagaaaacaaaaggccccgttcaatctgattgagcggggccttttttgtgcttgaacacactgtagatccaaatgtgggagggggctttcccccgattagcggtgtatcagccaaataactgcaactgacactccgtcatcgggggcaagccccctcccacactagcctttacacacaagggagctcggggtcagacgccaaactgctcgcgatatgcacgcaccgccggcagatgctgcttgagctgcggatcatcttccaggaactgcaacacctggttcaacgagacgatgctcacgactggaatgccgaaatcgcgctccacttcctggatggccgacaactcaccgttgccacgctcctggcggttcagcgcgatcagcacgccggcggccttggcgccgtcctgggaagcaatgatctgcatcacttcgcgaatagcggtgccggcggtgatcacgtcatcgatgatcagcacatcgcccttgagtggagcgccgaccaggctgccgccttcaccgtgggccttggcctctttacggttgaagcaccaaggcaggtcctgcccgtgatgctcagccagcgccacggcggtcgccgccgccaggggaatacccttgtaggccgggccaaacagcacatcgaaggaaataccgctctcaacgatggcagccgcatagaaacgacccagctgagccagggccgaacccgagttgaacagacccgcattgaagaagtacgggctggtgcgtcctgacttgagggtgaactcaccgaagcgcaaaaccccgcgatcgatggcaaaacgaatgaaatcgcgttgatacgcctgcatgaaaaaagcctcagataccacggatttagctaattaggtagacggcgtgtatcatacacgcacgcgatttttggggccatttatgcggatcatcagtgtgaacgttaatggtattcaggctgcagtcgagcgtggtttgctcagttggctgcaagcccagaatgccgacgtcatctgcctgcaggatacccgcgcctccgcctttgaactggacgacccagccttccaactggatggctacttcctttatgcctgcgatgccgaagtgcccacccaaggtggcgtagctttgtattcgcggttgcaacccaaggcggtcatcagcggcctcggcttcgagacagccgaccgctacgggcgctacctgcaagccgatttcgacaaggtcagcatcgcgaccttgctgcttccttcggggcagaacggcgatgaagacttgaaccagaagttcaagctaatggacgatttcgcccgttacctggataaacagcgacgcaaacgtcgcgagtacatttattgtggctcgctgtacgtggcgcaacagaagctggatatcaagaactggcgcgacagccagcaatccccgggcttcctggcgccggaacgggcctggatggacgagattgtcggcaacatgggctatgtggatgccctgcgcgaagtcagccgcgaaggcgaccagtacagctggtggccggacaacgaacaggctgagatgctcaacctgggctggcgcttcgactaccagttgctgaccccgggtctgcgccggttcgttcgcagcgcacgcctgccgcgccagccgcgcttctcgcagcacgcgccgctgatcgtggactacgactggacactgaccatctgaggtcttttcccaggcacaaaaaaaccgacatcgctgtcggtttttttgtgggtgctcattatttgatcacacgccaggtcaagggatagcggtaggcgatccccttgttggccttgatgctgccaatgatggtcagcaccaccgtggcgatcgccagggcgaacatcaggaaaaaaccaatcaccgcgaaagccagcaccatgcaagcgatccaggcgatggcgacggtgatctggaagttcagggcttccttgccctgatcatcaatgaacgagtccacttctttcttcatctgccataggatcagtggccccacgacgctgccgaaggggaacacaaaccccagaaaagccgcgagatgacacaacatcgcgccctggcgcacttcgtaggaaggtgtcggcaccggcatttggctgttgtcattcatggcgattctccttgagacgggctcagtcagccagggcggcgttctgcagttcgaagatctcggtcatgcctttctgggccagggccagcatcgcgttcagttcggccggctggaatggcgcgccttcggcggtgccctgcacttcgatgaaaccaccggtgctggtcatcaccacgttcaggtcggtctcggcagccgagtcttccaggtagtccaggtccagcactggctcgccctggtacatgcccaccgaaacagcggcgatcatttgcttgagcgggtcaccgcccttgaggccgccacgcttcttgatcactttcagcgcgtcaaccagggccaccatggcaccggtgatggacgcagtgcgggtgccaccgtcggcctggatcacgtcgcaatcgacgtacagggtcacgtcgcccagcttggacatgtccagggctgcgcgcagggaacgaccgatcaggcgctggatttccagggtgcggccgccttgcttgccacggctggcttcacgctggttacgctcgccggtggcgcgcggcaacatgccgtactctgcggtcagccaaccctggccctggcctttaagaaagcgcggtacgccgttttcgacgctgacggtgcagatcaccttggtatcgccaaactcgaccagtacggatccctcggcgtgtttggtgtagttgcgggtgatgcggatcgagcggagctgatcggcagcgcgaccacttggacgtttcataggggatacctgtactgaggacgaaaaactgccgagcattatagagccgcgggccgattcggggcactgctaaaaaatccggttacgaatgcccgggtttgggcgcactcgccccactgcgctacaatcctgcgccttcccaatcatcagcccgcatttacgggactgcaacgcgaggtacctccatggtgcacagcatgaccgcctttgcccgcgtcgaaaaagccggcgtacaaggcaccctgagctgggaactgcgctcggtcaacagccgctacctggagccgcatctgcgcctgccggagtcgttccgcgacctcgaaggcgctgtgcgtgaagcgctgcgccagggcatttcccgtggcaagctggaatgcaccctgcgctttaccgaagaaaccaccggcaagccgctgcaggttgaccgcgaccgcgccgcgcaattggtcgccgccgccgaaaccatcgccggcctgatcaagcagccggccgcgctcaaccccctggaagtgctggcctggcccggtgtgctggtggccgacgccaccgacccgcaagcgctcaacgccgaagccctcgccctgttcaatcagggtttgaaggagctcaaggccggccgcgagcgtgaaggcgccgagttggcccgcctgatcagcgagcgcctgacctcgatcgaagaagacgtggtcaccctgcgcgagctggtcccgcagatgcttgccgcccagcgccagaaggtcctcgaccgcttcaccgacatgaaggccgacctcgacccggtgcgcctggagcaggaaatggtactgctggcgcaaaagagcgatgtggccgaagaactggaccgcctgagcacccacatcctcgaagtacgccgcgtgctcaagtccggcggcgccgccggtcggcgcctggacttcctgatgcaggaactcaaccgcgaagccaatacactgggctccaaggctttcgatccgcgcagcaccacggctgcggtcaacctcaaggtgttgatcgagcagatgcgcgaacaagtacagaatattgagtaaggcaacctccatgacccacagcaccggcaccctttacatcatttccgctccttcgggcgcgggcaagagcagcctggtcaaggccctgaccgacgctgacgagcagatccgcatctcggtctcccacaccacccgcgccatgcgcccgggcgaggtgaacggggtgcactatcacttcgtcgagcgcaccgagttcgtcaagatgatcgaacacggcgacttcctggagcgcgccgaagtgttcggcaacctctatggtacttcgcaaagccacttgcagcagaccctggacgaaggccacgacttgatcctggaaatcgactggcagggtgccgaacaagtgcgccagctgatgcccaaggcgcgttcgatctttatcctgccgccgtcgcttgaagcgttgcaccagcgcctgaccaaccgcggccaggacagtgacgagatcatcgaaggccgcatgcgtgaagccgtcagcgaaatgagccactacgtcgactacgactacttgatcatcaacgacgatttttcccacgcactggatgatctgaaggcgattttccgcaccaatcagctccagcaaaagcgtcagcaacagcgttttggcaaattgctggccgaactgctcggttgattggctcttcccaaaaccgctgcaagggctttacattggcacttgtagcggttttgcgagggcctgcgaaaaatcagcgcttccctaaacgctggtgattttttaaactgtttagtccgctcgcccaaccgggcagcgcgcatcttgcattcgctccgaggaataccatggcccgcgtaaccgttgaagactgcctagaacacgtggataaccgctttgagctggtcatgctctctaccaagcgtgcccgtcaactggccactggcggcaaagagcccctggtccagtgggaaaacgacaagcctaccgttgtcgccctgcgtgaaatcgctgaaggcctgatgagctacgagttcatcgccaacgccgaaatcgttgaagacgaaccgctgtttgcagcgttcgaggacgagtccaacgaggccgtctaagcctatgcctggtcgacgtagcacggcgcggggtcacagccaacggcaggagttcacactttgccgagcatagacgccctcgccgatcgcttatcggcctacctcggcccagaccaggtcaacctggtccgccgagcgtatttctacgccgaacaagcccacgacggccaacgccgccgcagcggagaggcgtatgtcacccatcctcttgcggtggccaacattcttgccgacatgcacatggaccatcagagcctgatggccgcgatgctgcatgacgtgatcgaagacaccggcatcgccaaggaagcgctcagcgcgcaattcggcgaaaccgtggccgaactggtcgacggggtcagcaaactgacccagatgaacttcgagaccaaggccgaggcccaggcggaaaacttccagaagatggccatggccatggcccgcgatatccgcgtgatcctggtcaagctggccgaccggctgcacaacatgcgtacgctggaagtgctctccggcgaaaaacgccggcgcatcgccaaggaaaccctggaaatctacgcgcccatcgccaaccggctgggcatgcatgccattcgtatcgagttcgaagacctcggtttcaaggccatgcacccgatgcgttcggcacgcatctaccaggcggtcaagcgcgcccgtggcaaccgcaaggaaatcgtcaacaagatcgaagaatccctgagccattgcctggcgatcgacgagatcgagggcgaagtcagcggccgacaaaagcacatctacggcatctacaagaagatgcgcggcaagcgccgggccttcaacgagatcatggacgtgtacgcgttccggatcatcgtcgacaaggtcgacacctgttatcgcgtactgggcgctgtacataacttgtacaaacccctgccgggtcgcttcaaggattacatcgcgattcccaaggccaacggctaccagtcgctgcataccacgctgttcggtatgcacggggtgccgatcgagatccagattcgcacccgcgaaatggaagagatggccaacaacggcatcgccgcccattggctgtacaagtccagcggcgacgagcagcccaaaggcactcatgcgcgcgcccgccagtgggtcaagggcgtgctggaaatgcagcaacgcgccggcaactccctggaatttatcgaaagcgtgaagatcgacctgttcccggacgaggtctacgtgtttacgcccaaaggccggatcatggagctgcccaagggctccaccgccgtcgactttgcctatgcagtgcacaccgatgtgggcaacagctgcatcgcctgtcggatcaatcgtcgtctcgcaccgctgtccgaaccgctgcaaagtggctccacggtcgagatcgtcagtgctccaggcgcacggccgaacccggcgtggctcaacttcgtggtcaccggcaaggcgcgcacgcacatccgtcacgcgctgaaattgcagcgccgctccgagtccatcagcctgggcgaacgcctgctgaacaaggtgctcaacggtttcgacagcgctctcgacaagatcccgcaggaacgcgtacaagcgatgctccacgagtaccgtcaggaaaccatcgaagacctgctggaagatatcggcctgggcaaccgcatggcctatgtagtcgcccgccgcctgctcggcgaaggcgaacagctgccaagccccgaaggcccgctggcgattcgcggcaccgagggcctggtgctcagctacgccaagtgctgcacgccgatcccaggcgatccgattgtcggccacttgtccgcaggcaaaggcatggtggtgcacctggacaactgccgcaacatcaccgaaatccgccacaacccggaaaaatgcatccagctctcgtgggccaaggatgtcaccggcgaattcaacgtcgagttgcgcgtggagctggaacaccagcgtggcctgatcgccctgctcgccagcagcgtcaacgcagccgacggcaatatcgagaaaatcagcatggacgagcgcgatggccgcatcagcgtggtccaactggtggtcagcgtccacgaccgcgtgcacctggcccgcgtgatcaagaaactgcgtgccttgaccggtgtgatccgcatcactcgcatgcgcgcctaacccacattacaaggagtcattcatgaccaagaccgttatcaccagcgataaagcccctgccgccatcggcacttactcccaggcgatcaaggcgggcaacaccgtctacatgtccggccagatcccgctggacccaaagaccatggaactggtggaaggcttcgaagcacagaccgtacaggtcttcgaaaacctcaagtccgttgctgaagccgccggcggttcgttcaaggacatcgtcaagctgaacatcttcctcaccgacctgagccacttcgccaaggtcaacgagatcatgggcaagtacttcgaacagccgtacccagcccgcgccgccatcggcgttgccgccctgccaaagggtgcacaggttgagatggacgcgatcctggtcatcgagtaaaacacccggcgcagcccccacaggctgcgccgacttcgtttcagaaggatttcatgatgcgcaaagcgcttgtagcctcatcaatgctcgccctgttgctcggcggctgtgccagtaaccctgccgacagggatgtgagcggcacctggatcaaccaggtagccatcgatgcggctgccaagggcggccctttgcgtgaagccttgcagagctttggcccgaacctcgagtgggaggtcaataccaaggccgcgcaggcccgctactacaacggttttgaagtagcggaaggcaagttgctgggtgaacagtccggcgcctggagcgtggatttctacggcagctccgccaccgaactcaagcgcaaaggcaagcaactgctgcaagtggccaatgacaacgagcctgaacagctgtttgcccgcgccaaagaccccgccccggaaggcgcacctttgggcgccaacttcgagcgggcgctgtacgcggcctacctgggcggtgactggaagatcagcgacggcttcggcagcggcgccatcgtgcagttccaggctgacggcaaagtcgccggcctgcctaatgttgaccggtactcgctatgcctggccggtgattgcgcgtcaatgagcggcggctacgacagcatctggctgcaactcaatggccagggcaacccgtggatctttgtgcgcaagggcaagcaactggagattttccaggcggtgaataccgcgcaggccgacgaggtgccctcatttacgccggggcctcggcagtggctactggaaaaacagtgatacaaagcaaaggagcccaagggctcctttttctttagcctgcaccgcgattggcacgactgaagacattgccccatgcgcacactccttatcctcggcctcttgctgctgagcggctgcatccctgcagatatcagtggtgtctggatcaatcagccaatcattgatgtggccgcgcaaggcaaaccgctgaacatccacggtacgcatttggagtggcacatcgacactcgtgctggcaaggcacaggtgcgtaacggctttgagatgagcgaaggccagttactgctcaaatcccccaacgcctggatcgtcgactacggtggcggtcacaccgatgagctgcaatttgatggcaagtatctgacccaggcgaccaaccaatacgccccacaggaagtgttcagccgcccaaccgaaacggtggagacaggggataattgggtcaacaccttcgtgaaagccctgaacacagcgtacatggccggcgaatggaacatcatcgacggccccgggaaaggcacgacggcgatgttcaccgcgcagggtcgcgtttcagggcttgggcaagcagatcgatacacactgtgcctggacggcgactgccgatcccagggtgcgggcaatgaaaccctgctcttaggccatgcaggcaccgacgatacatggatcttcgtgcgcaaaggcaagcaacttgagattttccaggcggtgaataccgcgcaggccgacgaagcaccgcagttcacccccggcccccgccaatggctgctggaaaaacaatagccgccatgccgcaaatccaaatgtgggagggggcttgcccccgatggcagtgcatcagctaatacaactgtggctgacactccgctatcgggggcaagccccctcccacattttttgactgcgtttcagcccttgaggatcgccgcatagccttcgcgataagtcgggtaggtcggcgtccagcccaacgctttcgcccgggcattgctgcactgcttgctgcccgctcgccgcacactggcgtcctcagcccactcggtcaccccaaggtattcgcgcaaccagcccaccacttcggccagtggcgctggcgcatcgtcgacaccgatgtagaccttgtccagcgaaccgccctcttccacatggcgcaataaaaaggccagcagccccgcagcgtcttccgcatgaatgcgattgccatataaaggtggatcgattgcgactcggtagccctggcggacctgggtcagcaaccattcgcgtcccggaccataaatgccggtcaggcgcacgatgctggccgggatgccgctattgagcgccacctgctcagcctccagcatcacctgcccggaataccccttcgcctgagtctccgatgtttcgtcgacccactcgccattctgctgcccgtagacgctgctgctggatacaaacagcaggtgcttgggctcctggccgtagtcgcccaaccactcaagcacatgtttcagcccttctacataagcggcgcgatagccggcttcgtcgtggtccgtcgcagcggcgcagtacaccaggtaatccaccccgccaatcggccaggtgtctgggcaatccttcttgaacaagtcaccggcaatgccgatcacgccctcaggaagccgcgaaatatcgcggcgcaggccatgaacctcccattccgaggcgagcaactggctagccagccgactacccacatcgccacatccggcaatcacaacagaaggcgctgacatcacaaaactccgcgaagaaaggtctaggttagccttcgcagatgacagacggccagaaaaagcacaaataaagttactgtattacttctgttaacaagaattacttgcaataataaccgcccatttgtcctcgcccccagggtctggaaggacgatcactcatttttttactcaggtccggccagcatgacacgtaatacaacccccgcttcgccaaccaagcttcacagcccatcccgcgcctggcgcgcgattgctgcgctgctgttcagcgtactgctggcaccgaccgccgccttcgctgatgccaccgcgccagccaccccggcggccgccgagcacaacactgcggcaccggcagcaccggcagcacctgccgtagcgcccgctgccaccgacccggcccaggctgctgaccctgccgccgacgacagcggtgtggtgctggaagaagacaacaccctgggcatggcccacgacctgtcgccctggggcatgtaccagaacgctgacgtggtggtgaaagccgtgatgatcggcctggccatcgcctcgatcatcacctggaccatctggatcgccaaaggcttcgagctgctgggcgccaagcgtcgcctgcgcaccgaaatcgtccacctgaaaaaggccaccaccctcaaggaagccagcgaaagcgcgaccaaaaagggcaccctggccaataccctggtgcacgacgcgttggaagaaatgcgcctgtcggccaacacccgcgaaaaagaaggcatcaaggaacgtgtggccttccgcctggagcgtctggtggcggcctgcggccgtaacatgagcagcggcaccggcgtgctggcgaccatcggttccaccgcgccgttcgtcggcctgttcggtaccgtgtggggcatcatgaacagcttcatcggcatcgccaaaacccagaccaccaacctcgccgttgttgccccaggcatcgccgaagccctgctggccaccgccctgggcctggttgccgcgattcctgcggtggtgatctacaacgtcttcgcgcgttcgattgccggctataaggcccaggtatcggacgcgtcggcggaagtcctgctgctggtcagccgcgacctcgatcacctgcctaccgagcgcagctcgcaaccgcacatggtgaaagtggggtaatcggccatgggcctgcatttgaatcaaggcgacgacgaactcgtcgagaaccacgaaatcaacgtcacgccgtttatcgacgtgatgctggtgctgctgatcatcttcatggtggcagcaccgttggccaccgtggacatcaaggtcgacctgcccgcgtccagcgccaagccggcgccacggccggagaaaccgatcttcctcagcgtcaaggcggaccaacgcctgttcctgggcgaagaagaggtcaaggctgaaaccctggggccggtgctcgacgccaagacccagggcaagaaggacacgacgatcttcttccaggctgacaagggcgtggactacggcgacctgatgagcgtgatggatgccctgcgggcagccggctacctcaaggtaggcctggtcggacttgagacggcagccaagaaatgatcacgacgcgccacaaactgacgcgttatggcaccagcctcgccgtcgtactgggcgtgcatgccgtcgcgatcgctatcgcgcttcattggtcggcgccgcgcacggtgcagttgccaccggctgccatggtcatcgacctggcaccgatgccagccccaccgccgccggcaccgcccaaggtggtcacgccgccgcaaccgcctgccccggtggaagaactgccgctgccgaaactggccgaggcacccaagccgacgatccaggtgcccaagccggtcaagcccaagcccaaaccgcagccgcccaagcctgtggagaagaagatcgagccgcccaaggagaaaccttccgaggacccgccgagcgatgctccgccgacccaggcaccggctgaaaaatcggcccagcccgttcctggcccgtcgccgcaacagatcgccgccaaggcgtcctgggaaggcaccctgctggcccacctgcagaagtacaagaagtacccgccaggcgcccaggcgcgtggcaaggaaggcctcaaccgcttgaagttcgtggtggatgccgagggtaacgtgctgtcctacgagttggtgggccgctccggcaacgccgacctggaccgcgccacgctggacatgatccgtcgtgcccagccgctgcccaagccaccggcagacatgctcaagggtggcagcatcgagatcgttgcaccgttcgtgtacaacatcgaaaaacgtcgtcgctgagccgctcccaatgggcaccctcgggtgcccattgcgctccccctccccggtatttcaagccttgcaaacccgcgagctgaaccgttactgaacgtgaaaccaatgtcatggttcttcacttgtaacacttcaatacaccaccaatcatgcgcgaataattctcatttgagaggcttttcgccatgtcctgccctccccgcctgacgcttgccctgctcgcaatcgctggcgccccctgcgcagcccatgcggatcaactggtcagcctgaccgtgcaaaaccacaccttcacacccgccagcttcaccgtgccggctggggagcgctttcgcatccagctcaccaacaacgacgacaccgtcgacgaattcgaaagctacgacatgaaattcgaaaagatcgtcgtgcccggcaacaccattaccgtcttcgccggcccgatgcatccgggcacctacagctttttcgacgactaccaccccgaccaggccaaaggcaccgtcaccgtcgtcgcggccaaggagtaagtcatgctggcctgtctgctgatcgtgtttcgtgaagtcctggaagccggcatcgtcatcggtatcgtcatggccgccacccaggggctggcgcggcgcagtgcctacatcatcggcggcatcgctgccggtgttggcggcgcggcgatcctcgcgctgttcactggcgccatcacccaggccctggacggtttcggccaggaaatcttcaacgccaccatccttatcgtcgcggtgtgcatgctcggctggcacaacctgtggatgagtagccatggccgcgaactcgctactcaactgcgcgaaagcggggcggcggtgcaacgcggcgaaaagaccctgtgggcactggccatcgtgatcaccgtggccgtgctgcgcgaaggctcggaaatcgtgctgttcctgtatggcatcgccgcctccacccacaccgaacccctgacgatgttcatcggcggcgtgctcgggattgccggcggcggcgtgctgtcgtggctgctgtatcgcgggctggtggtgatcagcctcaagcgcctgttctcggtcaccacctggatgatcgccgtactcgcggcgggaatggccggccgcgccgccgcgatcctggccggtatcaacctgatcccggcctggggctacgagttgtgggacacctcttggctagtctccgacgcaagcctcaccggtagggcgctgcaagcgctgactggctacaccgaccgccccctgggcgttcaactgtttgcctgggtggccacccttaccctgctgctactgggtagccgccttgtgcagtcgcgcaccactcaaccgtcttcatccaccctggagcgtcacccatgaaccacctgtccaaacccgtggccgctgcgctggtcctgaccagtgccctggctttttccgccgtcagccaagcccgtgaatacccgatcggcgggccggttcagacccacgacatggagatcgcctcctcgtacctcaccgggatcgagatggcgccaatgccaccaggcatggtcatggacaaggactcggtgcaccttgaaaccgatgtgcatgccaccgccgacaacaagtacggactgtccaacggtgaatgggtgccttacctgagcatctcctattccctggtcaaggaaggcgctccggactacaaacaaatcggcacgctcctgccgatggttgccaaagacggcgcccactatgcgaacaacgtgaagatggacggccccggcacctataccgtggtcctgcgctatgagagcccgcagatcaatggcttcttccaccacgtcgacaaagaaaccggcgtccccgaatggtggggcccgttcaccgagaccttcaccttcaaatacccgcagaaataaccggcaaaacacctgcggcacccgattagctggtgtcgcaaaccccatcgtgtctgataacgtgcgtctatcgattgcagccggtatgcttggcccgcaacctcatggacgcccgctatgactcttacagaattgcgctacatcgtcaccctcgcccaagagcagcacttcggccacgcggccgagcgttgccatgtcagccaaccgacgctgtcggtgggcgtgaaaaagcttgaagacgaactcggtgtgctgattttcgagcgcagcaagagcgccgtgcgcctcaccccggtgggcgaaggcatcgtggcccaggcccagaaggtgctggagcaggcgcagagcattcgcgaactggcccaggccggcaagaaccagctgaccgcgccgctcaaggtcggcgccatctacaccgtcggcccgtacctgtttccgcacctgatcccgcaactgcaccgcgtcgcgccgcagatgccgctgtatatcgaagaaaatttcacccacgtgttgcgtgacaaactgcgcaacggcgagctggacgcgatcatcatcgccctgccgttcaatgaagccgacgtgctgaccctgccgctctacgacgagccgttctacgtgctgatgccggcctcgcacccgtggacccagaaagacaccatcgacgccggcctgctcaacgacaagagcctgctgttgctcggtgaagggcactgcttccgcgaccaggtcctcgaagcctgcccgaccctgaccaagggcaatgacggcgccaagcacaccaccgtggaatccagctccctggaaaccatccgccacatggtcgcgtccggcctgggcatttccatcctgccgctgtcagcggtggacagccatcactacgcccccggcgtgatcgaagtgcgccccctcacgccgccggtgccgttccgcaccgtggcgatcgcctggcgcgccagcttcccacggcccaaagcgattgagatcctcgccgactcgatccgcctgtgttcggtcgccaagccgactgccgcgagctaagccagggtatgactgagctgtcgcaggtgtcggtgacggcactcaagggtgtcggtgaagccatggccgagaagctggccaaggtgggcctggagaacctccaggacgtgctgttccatctgcccctgcgctatcaggaccgcacccgcgtagtgcccatcggccagttgcgccccgggcaggacgcagtggtcgaaggcaccgtcagcggtgccgatgtggtgatgggcaagcgccgcagtctggtcgtacgcctgcaggatggcactggcggcctgagcctgcgcttctaccatttcagcaacgcgcagaaggaaggcctcaagcgcggcacccgcgtgcgctgctacggcgaagcgcgacccggcgcatccggccttgagatctatcacccggaataccgcgccattaccggtgacgaaccgccgccggtcgacaccacgctcacgccgatctacccgctcaccgaaggcctgacccagcaacgcctgcgccaactgtgcatgcagacgctgaccatgctcggtccgaaaagcctgcctgattggctgccccaggaactggcccgcgactatcaactggcgccgctggacgatgcaatccgctacctgcatcacccgcccgccgacgccgatgtcgacgaactcgcactcggtcatcactgggcccagcaccgtctggcctttgaagaactgctgacccaccaattgtcgcagcaacgcctgcgcgaaagcatgcgctccctgcgtgcaccggcaatgcccaaggccacgcgcctgcccgcgcagtacctggccaacctcggttttgcgccgaccggtgcccagcaacgcgtcggcaatgaaatcgcctatgacctgagccagcaagagcccatgctgcggctgatccagggcgatgtgggcgcaggcaagaccgtggtcgccgccctcgccgccctgcaagcactggaagccggctaccaggtggcgctgatggcgcccaccgagatcctcgccgagcagcacttcatcaccttcaagcgctggctcgaaccgctgggcctggaagtcgcgtggctggccggcaagctcaagggcaagaaccgcgcggcggcactggaacagatcgctggcggcgccccgatggtggtgggcacccacgcgctgttccaggacgaagtgcagttcaagaacctggcgctggtgatcatcgacgaacagcaccgcttcggcgtgcaacagcgcctggccctgcgccagaaaggcgtgggcgggcggatgaacccgcaccagttgatcatgaccgccacaccgattccgcgcaccctggccatgagcgcctacgccgacctcgacacctcgatcctcgacgaactgccgcctggccgtacgccggtcaacaccgtgctggtcaccgacacccggcgcgtggaagtgatcgaacgcgtacgcggcgcctgtgccgaagggcgccaggcgtactgggtgtgcacgctgatcgaagagtccgaagagctgacctgccaagcggccgaaaccacttacgaagacctcaccagcgccctcggcgaactcaaggtcgggctgatccacgggcgtatgaaaccggctgaaaaggccgcagtgatggccgagttcaaggccggcaacctgcaactgctggtcgccaccacggtgattgaagtgggcgtggacgtgcccaacgccagcctgatgatcatcgaaaaccccgagcgcctgggcctggcgcaactgcaccagttgcgtggccgtgtgggccgaggcagcgccgccagccactgcgtgctgctctaccacccgccgctgtcacagatcggccgccagcgcctgggcatcatgcgtgaaaccaacgacggttttgtcatcgccgaaaaagacctggaactgcgcggccccggcgaaatgctcggcacccgtcagaccggcctgctgcaattcaaagtcgccgacctgatgcgcgacgccgacctgctgccagccgtgcgcgatgcggcgcaggcgctgctggagcgctggccggatcacgtcagcccgctgctcaatcgctggctcaggcatgggcagcaatacggccaagtgtgacgcctgacgcacttaagcgaccaacagttgtatcaagctggttatacttcgtggactgtaagaaattggatcaggccatgtcagaagttgccctcgccacagccccactgaccgccccgccggtcattcgggctctgctcgccaaactcgtcatcccctacacggaagtcgccgacctcccgggcctgaatcctgcgcagaaggtccaggcggtgctgttggaagacgcggtgggcgccctgatggtgctgtttccgcagaaccagttgctcgacctcaaccgccttgccgaactcaccggtcgtcgcctgaccgctgtgtcgccggatcgcgtcaagcgcatgctcgacaaacatgacctgagcctgctgcctggtctgccaccccttaccagttcgccctgcctgtacgaaggcagcctgctcaacgagccgagcctgctggtgcattcgggtgaagccgggctgctgctcgacattgacaccaacgccttcaagaccctgctcaccaaggccagcgccgggcacttcggcgagccgctgagcaatatccgccccaacctcgaccgccccaatgacgaccgcgaggaaatcacccaggcgatgcaggcgttcaccgcccgccgtatccagcaacgcctggaagcgaccatcgagattccaccgctggccgataccgcacagaagatcatcaagctgcgcgtcgacccaaacgccaccatcgatgacatcaccggcgtggtcgagaccgacccggccctggccgcccaagtggtgagctgggcagcgtcgccgtactacgcctcgccgggcaagattcgttcagtggaagacgccatcgtgcgtgtgctgggcttcgacctagtgatcaacctggcgctgggcctggccctgggcaagaccctgagcctgcccaaggaccacccgcaccagtcgacgccgtactggcaccagtcgatctacaccgccgccgtgatcgaaggcctgacccgcgccatgccccgcgcccagcgcccggaagccggcctgacctacctcgccggcttgctgcacaacttcggctacctgttgctggcccacgtgttcccgccgcacttctcgctgatctgccgccacctggaggtcaacccgcacctgtgccacagctatgtcgagcaacacctgctgggcattagccgcgagcagatcggcgcctggctgatgcgctactgggacatgccggacgaactgtccaccgccctgcgcttccagcacgacccgacctacgatgggcaatacgccgagtacccgaacctggtgtgcctggccgtgcgcctgttgcgtagccgcggaatcggctccgggccggacgaggcgattccggatgcgctgctcgagcgcctgggcttgagccgtgacaaggctgaagaggtggtgggcaaagtgcttgatgctgaagtgctgttgcgcgaattggcgtcgcagttcagccagggctaaatcgatagcctgtcagaccgctatcggggggcaagccccctcccacacttgaaatgcattcccctgtgggagggggcttgcccccgatgaatccacctcggtctacttctttttcttcggcttcaaatacttggtcaacccctggaaccagatcaccagcgccgggttgcccttgatctggatcgacttgtcctgaatccccgtcatgaacgccaattgcttgttcttcgcctgcatcgtggcgaagccgtaggcggcatctttgaacgcaatggcaaacgccggcgccgggtgcacacccgagcggctggtgatgcgctggtctttgacgatgaagtgacgggcaaccttgccgtcgagggtctgcagctggaacgccaggtctttatcgcccaactgttgctggaaggcaggattggtgcggctggctttgcccatcatcaagcccaacacccacaggagaagacggaatttcatgactacgcagcctcgttgaattaaacagcaggcgcagtttatcgattcccgcctagaacaccaacgaagtttcgtagcactaagaggtagacattcgctgcaggcctaatgaccaagcagtcacatcttaaacgctcgaccgacattcaaagacatgatgatttatcctgttttttgaactagcgcatattcaaaatcattctaaataactgtcaaaactcacagttatgccacaaccaaacacgccatagagtttaccaagacgtcaatcaaacaccattgattacgcgaacaaacttgaggtgtccctcgtgaaagcatttgccaactgcccaaaattcattcgtaacggccctacaacgccaaacagcacaggctacctgaaaaccgacatttcaatgttgccccttcccccgtttaatacgttcaaagccaccaaagacttgaccatgcggtttaatggagatcatctcgaagtcgttgcaaccgttgatatgtatccccacttgcgcttctacatttacatacacaaagaggacttacacaatgaagggacgttaccgatagatccctctggtctccccggcacagcctatgcgggttttattgccgataagctatacgacggaaccaaaggggaactttcgttctgctaccacggccgagaaggacgactcgatgccacgctgcactttgaggcagccccctatgggttcagcgatggagtcgttgaggtaacaggtctggaacctcccgttaaatagagttaaccagcctacgtagaacgccagtcagtaaaaccagctgacgttctacggttgaccacagcgtcttacttaaacattagggcaaggaaccggcgcccagtcggccaggttcggatcgcggcagctaccttcgagctgagctttgccggcgctggcgacctgcttgctttcagcctgcttggcctgcacggtctggatgctcttctcggtggtgacggcttctttcggcacgactggcagagccggctttttcgcaaccttgaccggcttcttgcccttggccggagcggccacaggtgcggtgtcggcggtcgccacggtcactacgtcattacgctgcacgcccacctgttgcaggtctttctcgtaagcctgggtgtagttgttcaggtcttcgctggccttgccgttgaccgcaacgatcaggtcattggactccttcaggcccgccacgatttccgccaggcgcttgcggccttcggtgtcgttgacggtcttggccttgcggtcggccaccagcttggtgaacgcgctctggtagcactgttgcgatgccttggcgtaggcggtgctgcgatcgatgtcggaggcgcttttgttgaagtcggtggagtacgacgcgatgcgctggttgtcatcggcgatctgcttctgacgctcggtgtagtaacccgccgcgccgccggccagggcgccgcccgctgcgccgatggcggcgttacggccacgcttgtcggagtcgccggtcagcgcaccgagcaatgcaccaccggcagcgccgatggccgcgccggtcacgaccgacttggtcatgttcgagtcggtggcgcgcaagtgctgcaccggctcgtagcagttggggtagtactcgaccttggtgctcgacgcgaccttggaggccggcgacgtggcgcaaccggtcagcacagtgctgaaaccggccgcgatcagcagcaagtgacgcttggaaaccgccttacgggaaaaaagcataggtgtgttctcttttaagtttgacttgcccagcacggccaccgccgcctgagtcccttccaagctcgctatacagccagcgctcatcgctgaccgctcgctgcgagcaattccttcaagatcgttgccgggtcggcccgctgttgcttgcggtagttgccgacatggcgaacgaacagtgttgcgcgcgtcaccaggctcttgccgagcaccggcttgcgatccaactcttccttgatccgttgaaactgcgcctggatcaccgcatcggtgtaacgcgtgccggtggccaggttgtcgatatagatcgccaccgcgccatcgagggcgctgcggccattggcaatggccatgtcgaacagttgcgcgctggccgcgtccttgttgtccagggcctgctggcgactcttctgcaggttggccaggcggatgttgtagttggcgatggtctcggccaccagcgcggccgactgaatcaggttgcccgccgcttcttcgcgctgctgggcgatcagcgagacgttgcgcttgagctcttcattgaccagccccagttcggcttgcagcttggggtcgacgctggcggcgatgatgctgtccaggcgcttggtcgggtcctgggcgtcgtcgatggcatcagtcagcgcggccaggcggccctctttctgccactgggcgaacagctccttgtagcgtgaacgcggtgccgacagcgcaccgatcgccacgcggaaaccggtggtctcgttgctctgctcggtgccatctgcggcgaacagtgggtattcgcggcgcatgccggtgaacagcgtgccctcgccttccaggtagttgccgcctttgaccacaaagccaccgtaggtgccctggcgacgcccggcgtggaccagttggaacgattcctggaccatttccgcggcgttgccgatcacgtcgaacagaccgatggggttgggcaatttggtgccgatgggcatcaggcgcgcagcctgcccggtgccgcccgccacctggttgaacaccgcgtagtcgccgagcgggccgtcgctgtcgctgccttcgacacggcgcgggaacaggcgcccttccaggtcctggcggctcacggcgtgaccgccgcgtgcggcaaattcccactccacttcggtagggaggcgcacaaagcccaggccgccatcatccgccgaggagccacgaccactcaccggcagcaagtctcggtggtatttcatcaaccaggcgctgtacaccgccgagaagcgttcagcctcaaagcgcgacagtttcaccttgggtaagcgcccggccatgccggtcggtacatcgcacgccggtgcaggctcgccgctggccagcgactgcgcctgggacatcacctgggcgtactggcgtgcggtcacttcgtacttgccgatgaagtacagcatgggcttgagtggggtcttggcgtcggtcttcggcatcaagggcgcgatgactttgttccagtccttgggcaggtccttgagggtgaactggccgttgatgaagtcgcggcggtagccggaaataaacgattgctggtaacccgcctcgccttcggcaaaggggtagccgaggctgatctcgcggtcatccagggtgccttgggccagcacgtaggcgtagcggaacagcatgttgccttcgcagggcagcggtaggctgacatcgccttccaacggcttggggttgtcgagcttgtcactcgcctcatcggcccaggccatcgaggccagggtcagcgccatacaggcgcccagtaacttatacatctctgattccttcagaagcctggacccgcgccactcgccaaccaccacacgccgccgccacggcgctgacgccgaggactgcgaccagggccaggccgtaatggcgcgccagcaggtggctggcgaattcgcccggcacctgcacgaataattcattcaagcccgcctcggccagcccatacagcccggcactgagtacggcagcaaaacccgcgctgtacagcgcctgtaccaccacgaacaacagcagcccaccggtggaaaaccccagcaggcgcaacaccgacaactcccgccgcttgcgcgccacagcggccagggcgccggcaaaaatcgccgcaaacgcccccgccaacgccaacccgcagatcacccagaacacgatcgacaggttgcggctcaacgactgcacctgcgcgatggtctgcgcctgggtcgacaccaacaggttctgcccggcgaagtacacccgcagcggctccacatcggtgaggttgcgggcgtacaggcggaacgccgggtacacgcgctgctcactcacacccacggcctccccgtcccaacccaacgccggcactgcgcggccatcgcggtaatcttccgccgcttccagcaaccccaggtcggcaaacaaaccgtcacgggcaaaggcttccagcggcaacaccgccagcacctgcacccgcgtgcgctgggcttcgacgcgcccggccacttgccgtgcaaagctggtttccagccaatcgccaggccgcgccgcgagcttttcggcggcggtgtggctcagcacgatctggtccaggcccttgggcaccggcaggccggccagcagtgggtcacccgacgcggtcggcagcatctccagggccaacgtgcccacttgcgccgtcgccgcaatctgccgcgtacgcggtatggcgaacgccacctcaccgcgctcgcccagttgctcgataaatgccctgctgaatcgaccaccgcccagcggaataatttcacgggtggcggggtcggtctgcaaacgttcggtcaaactgctaaccagtccaaacttcaggccgaataacaccagcagcggcgcgatcaccgccaccagcgccagcaccgaacaggccgacagccaggcgtcattgcggtaatcctgccaggccagcgacgccaccagaccgatgcgcatcagcacacctccccgagggtggcggtgacgccgccatcggtgtcgcgacggcaactgatgcgccgcacctgcaagccactggcgcgggccaggggctcgtcatgggtggcgatcacacaggccgcacggtgttcacgggcctgggccagcaatgcctgcatcacgcgctcggcattcaacgggtcgagggacgccgtcggttcgtccgccagcaccagttgcggcgcatgggccagggcacgggcgcagctgacacgctggcgctgccccaccgacagcgccgccggcttcttggccaactggtcgctgatctccaactgctcggccaggcgcgtcacgctgccatcgtccttcaaacccagcagttgccgggacagggcgatattcccgcgcacatcaagaaagcccagcaggccgccggtttgcagcacatagcccaagtgctggctgcgcagcgcggccaggctggattgccgatcggcgcgccacagcccggcgatgtcctgttgatgaaattcaaactgccccacctgatccggcgccaacaccagcgccagcagatcgagcaaggtgcttttaccgcaaccgctgggcccgacaatcgccacttgctcacccgcacgcagcgccagcgccgggatcaccaggctatagcgctggctgccgacgccccggctcttgtgcaccgcattcaggttcagcatcacggcaacgtcgacaatggcacgcggtacaacgcgtcgcccggctcggcatcgccgaagcggacccagttggccaggtcattgtggaaggtttcgtagaggcggattttcgagtccagctcgtcgataaagtcttcctgctcggccacgctcaacgacaaccacaaatcctgggtcatgttcagcgacttgctgcggtacggcaggccttcgaggtattcgccgagaacgccgccgtcagccaggttgccgcccttgcgcagggcctgcgggtcgcggctcatgtaggccgaggcgctggcgatttcctggaagaagtctttcggtgaggtctgggtcttgcgcgccgcgtcgacgatcagtttcagcgactgctgcaggtcgttgagctgcaacttggtcagcatcacgcacacctggaacgccggcagcgccggattggtcaggtcgcggtcggcggtccaggcgctgaccagctgcggcgcctggctcgcggttttgcgaccgaggaaatccatgtgcatggcatagccgaccgctgcagacttgtccgccaggctcggtgcgctgttcagcaacggcaccggctgcggcgtgttgctgcgcacctggtgcaccaggttggcgaacaccgtgccgatctcatccacccgctcgccgagcttgcgcacatcgccaccgggcaccgccgtgtacaggtcgccaatctgtgggttggcgtcggcggtgaggatgcggtactggctctcggcgccggcgtgggttttcttgccggcgtcggtgcgcaggtgcaaggcgtagatcttgatctgcttgcccagcgcggcctggcgcacttcggcttcgttcatctgggtagcggcgaacgggtcgttcttgcgcagcgcgccggcgtcggtgacgagcaggatgatgcgcccgccataaccggaccaatccatgccgtccaccgcctgcatcaccccggcgaacgcatcttcgttgaaggagtggctggacacggtggatgccttgacctggcgcgccatgtcgaggaagcgttgcgggtcgcggccctgatcgaggctgatcagggtcttggccacgtattccaggcccggggttttcttgatgctgctgcgaaaaccgaccatgccgaagctgacactgtccaactcgccgcgctcggcgatgcgggtttgcagctcgtgcaccacgtcgcggatctggtcgatatagggctgcatcgacacggtggtgtccaccaccagcaccaccgccgtgcggaaggcgtcggcgttggcattcatcaccggggtcgcgggcttggctgccgcgctgctgccggggtcgatggaagccacattgagcaactgcaccggttggccgttttcgtcgaagctttctttggagtcgaagatcggcaacaggtagaactggttctgcgggacggcgctggcggcgggctccaacgccaggatctggctgttgtcttcgctgtttttctgcgccttggccagcacgcctttggcggccgaagggtcagccaggagtttttccacttcgccggattggcgcaggaacatcaccggtgcccggcccgagcgctcggtgaatttcagcaccaggctctgcttccagtcgctgacttgagacgcaggcaaccaaccgtcgctgcgcccatcggtggcggcgccgacacgcacccacgggctgccgtcgacgtccttgcgctggtacacatagagcacggaaaacgccggcagggccttgcctggcgcgctgcccgcatcggtggaaagctttgcgcccggcttgctgagcacgcgctggaacagggtcttcttgcccgccatcaacagcggacgctggccgccgtccacttcggcgaccgctggcggcggtggggtgacgttcggtacctgggcagcgggcggtttagctaccggctcgtcactgccgctcaaccaccagtaactcgcaccgccaatcgccagtgccaccgccaccgcaaccgccgccagcgccaacaccggcccacggcgctgctcgctgtgctgggtcggcggcaccaccggttggcgcaccggctggggtttctcgctgggaatctcgatggattccggggtgatgcccgccaggtcgaaactcatcggaatcggcagcggccgcaccagcgtggcttccggcgagtccgccggcaggttatccaaggcccgcaacagcgccgcggcgtccgggaaacgctcagccgggtccttggccaacagcttgcgcagcacgtcctgataacggccatggtgcaccggcagttccggcagcggttcggtcaggtgcgccagcgccgtggagagcgcatcggtgccggtgtaaggcagcttgccgaccagaatctcgtacagcaccacgcccagcgcatacaggtcggcgcggccgtcgatctcctggccccgcgcctgttccgggctcatgtagctgggggtgcccacggcaaacccggcctgggtgaattgcgtgcggtcatccagtgacttggcgatgccgaagtcggacagcaccgccgtgccatcggcgcggaacagaatgttcgccggttttacatcgcggtgcaccaggccctgggcgtgggcatagcccagcgccgaggcgatctggcggatcagcgtcacgccctgctccggcgtcatgccggcggcgatgcgctccttgagcgtgccgttgggcaggtattccatggccatgtagtacagctcaccgacattgccgatgtcatggatggtcaccgtgtgcgggtgcgacaaccgcgccagggtcttgccctcgcgcaggaagcgctcgcagaaggttggatcggccgccagcgccgccgccatcaccttcaatgccaccttgcgctccagcgagcgctgggtcgccaggtacacgctggccatggcgccttcgccgatctcgccttcgatgtcataaccggggatgacgatgttcatggcgataccttcacgacaatggcggtgatgttgtccggcgcgccccggttgagccccaggtgcacgaggctgcgcacgatttcatccggcgcgtcgtggctgagcacttcgcggatttcatggtcttcgacggttttgttcaggccatcgctgcacagcaggtaactatcgccgggggcgatcagcaggtcgaccaccgccagctccaggtgggcttccacgccaatcgcgcgggtgacgatgttggcgcgcgggtgcgtacgcgcgtcggcttcgctgagcaggccgctgtcttgcaggtcctggacgtagctgtggtcgcgggagatgccttcgagcgcgccgtcgcgcaggcggtacaagcgactgtcgccggcccacaggcacacaccgcgcaggccacgggcggccaacaccaccacggtgctgcccatcatggtcacgccacggttggcggtttcttcgcgcacggctgcgttgatgcgctgcaggtcgttgcgcaacgctgccgtgtattcatccagcgaacgccccaccggcacgctgcgcaagctgtcgacgatcaggctgctgacatagtcgcccgccgcgtgcccgcccataccgtcggccaccacccacaggcggttttccggcaggtccaggcaggcgtcttcgttgacctggcggaccatgcccacatggcttttgctcgcggatttgtacgtcgaccccatctacaccacaccttcttgtccgagcaaaaactgcgcaaaatcgctggcgacaggcaggccctgacaccgcagcaaaccaggggaaatacgttgcgaaccacgcccccaccacaggctggcgccttcgcaggcctgttcggccagggccgtcatgcgctgctgcggcacggtcgcggccacccgttgcaggccggcgaaacgactgtccacggcacgcggctcgctcgccggcaagcccaggttgtcgaggccgtggttgaaactttcaaaggtggcgccggcatccagggtgctgagcaacagttcttcggcctgctcgaaccagttgtccgggccgcccaccagagaggccggattggtgtcgtggtcgagcaacaccaccaccgccagcgggaagtagcgccccacccggtcgatgctcggcattaccacgcccgccgccgcatccggcccgcacacgcccggcgccagcacaaagcgccacagcgggctgaccaggtaagtattgagccattcaccgccgaggctgttctgactggccagcaaacccgccgccagccagctgtcccacgggccgataaagctctggggcaaggcgcggctgacaaagtcgccacggctggccaacttgccgtagaagcccagcgtcgtcatagccgctccggcaggctgaagccactgagcacgcggctcttgaacgggttgaaggcgctgttggcgcgcaactcgtaggcaatgctcgcaccgtcgacgcgcaggcgcaggttgaagcggtccggcgaattaccggcggtgaggtccgactgttccagcaagcggaaccaggcccacggcccgtccagggtcacgccggaacggccgctggcggcgggcggcatgatcgaaatgcgcaccacgccaatgctgccggggttcggccattgcatcgccaccgggcggctggggccgtggtcgtagctcagctgctggccgtccaggtccagcaggaactgggtgatggtcgggtccatcgacaccggtttgagttcgaaacgcacgatgggttgagtcccccccgcgcggaagaacgcatcgcggatcgtcgcggcacgctggaaggtctgcagcacgcccggagcaatccccagcttctgcgccgcgcccggctgccaacgccaggtctgcgcggacgtatcgacgtaaggctgcaggtatttgcggaagtagttgtccatcaccccgcccacgccgaagaattggccgaagtcatccagggtggcgtcccgtgcactgcccggcgacatcgggtagcgcccggccagggactgacgatacacgttgaccacttcgctgacccaggcggcgttcaattggttgcgcacgccgcccatcatgctgttggtggtggagttgaccaccgacttgaccatgccctgcaccagcggtggctggcgctcggcattcaggctgactcgcgtggccgcagccgccgcctggttcttcgcctcgccgagcaacgcatcgccgctggcgccgaccatggcgctgacctgcacatacagcgcgttcatgtcggtgagcaggccgtcgatggccgccggttcgccttcgttcttgctgacgatgctgttgagctgggcgaagtgcgcggtcaccgggtcctccgccgccgcaggcgcattggcagtcggttgttcctggccgagcaggctgcccaggcgctccttgagcttgtcgacgccgccttccactggcacgcccttggcggccaactggcgttcttcggcttgcaggtcggtttccttggccaccgccaccagcagttttttcagaggcgaggtcggcccggaaatcacccgcagcacatcagccgcctgggccacgctggtgatcggcacaaagtcgatgtccgccagcaacgcatcccactggcgctggtagtcctggaaatacaggcgccgcacatcggcggccaggctcaccacgttctgctggtcggcctgttcctggcccaacacccactgctcttcagcgagggtgccagtctggttcagactgctcagcaggaacgcctggcgatagcccttggcggtgaagaacccactcaacggctcgcccagcggcttgccgcttttgcggctgaacaccagcgcggcgtcacggccagcggcttcgttgaggcgaaagtccgggataccctcgggcagtttctggcgcttgacccggtcatatacgcgctgggccaccggcagttgttgcaactggcggcgcaggtcgtcgatcagccgctgatccaggcgcgcgttcggcgggtggcgttcgaacagcgactgcaagtgcccggccaatgcctggcgctgatccgccggcaggtcgcggggcaggttgcggtcccagtccagggcgatccaggccttgatgaagtccgggtcgtaatgctcggcgtcagccagcatcaggtaggccttgaggccttcgtagaggaagtcggaattgccgccgccgtgcagttgttcttcgatgcgcgtcaccaggcgtggcgcgaacaccgcgatcagcagcttgcggtagacgctggcagactcggcttcaagcatatcgccctgatacagcccgaggccttcggaccagctcggcgaatcgcccgccaggtttttcacggcgttgagcaacggcagcacggcgagcacttcgcgctgcgccgggctcaggttctgcacggcctggcccagcggcgcgaccttctggtcgacctgggcgatgtaggcctggttggcgcgataactcacccaccacaaaccgctgaccaccacgaccaacgccacagtggcggccaacacaccccgcgcaatccacttgcgccgacgctcgaccttcgggttcacccccaccaggccacgctcggcaaacgccacggcggtgaagagtttttcgatgaagtagctgcgcccggtgccgctctggcgcgccaaatgctggcggtccaggttcatgctctgggccatggcgccgatcaggcggtcaatcgggctgccttcctgggtgccgctggtgaagtacacgccgcgcagcaacacgcgctcttcaaaggcattgggtttgaacacgccttcgaggaagctttgcaaacaatccttcaaggcgccgaactgctgcgggaagccatagatcaggtcgcgccgcgccgggtcgcgttcctgttgcaggcgttcgaccaggcgctcattgaggcgctgttccagcccggcgaactcgctttgcaggtgtgccaatgggctgtcgctgtttttgccatcgtccagggcaaaggtcatgccccacacctgggcgcgctcttccttgctcaggttatcgaagaactccatgaagcccggcaccaggtcgagcttggtcagcatcaggtagatcgggaagcgcacgcccagttgggtgtacagctcctggatacgcaggcggatggcagcggcgtgggcggcgcgctcggcgtcggtgcccagcaacaggtccgacaggctgatggcaatgaacgcaccatcgatggggcgacgtgagcgctgttttttcagcaggtcgaggaagcccagccaggcggccttatcgaccgtggagttgctatcctgggtggtgtagcggccggcggtgtcgagcagcacggcttgatcggtaaaccaccagtcgcagttgcgcgtaccgccaacgccacgcaccgcaccggcgcccaactgcgccgccagcggaaaatgcagcccggagttgaccagcgcggtggtcttgcccgaacccggcgggccgatgatcacgtaccacggcaactcgtagaggttgcggcgctcatcgccaccgagcttggcctttttcagcagggccagggcctcgtccatgcgctggcgcagggtggtgagctcttcggcggtggcgacgctgttggggtcggccggggtttcggcggccaggctgcgcatcacttcagcggcctgacggcgggcctggataatgcggaacacgcggtaggccagccacaccgcgaacaccaggatgatcaacgcccagcgccggccttctggtaccagcacgtcgagcaacggcccgacaaaccagatgatcaggctcagggcgatcaaacccagcacggggatcacccagcgaatcatgaaactgaaaaacgccttcactcgacgccctccgccaatacggtgatttcaacccgacgattgcgggcacggccttcggcggtggcgttggtcgccaccggctcggtgtcgctgcgcccttcggcactgaagcgctcggcctggccggtcttggccgccaggatctccagcaccgacttggcccgcgcttcggacagcgcccagttggacgggaagcgcaacgtggcaatcgggcggttgtcgctgtgcccggtcacccgcacctggcccttgaccttgcggatggcgtcggcgatgcgcagcatcagcggctggtagtcatcgacgatgctggaactggcggacgcaaacagctcgtcgccgcgaatggtcaccacggagcggtcgaccgcatcttccactgccacgcggccggccttgatgtcttccaccaggaagccagccaggcgcggacgctcgatgactttgggctgcgccaccggacgatcgatggcctgcaccgggatctcgcccagggcatggatattcttgaacaccggctcggcatccgacgccagcttcatgcgcaagccaaacagcaacgccagtaacaacgccaagccgatggccacggcgatccacggcggcatgaattgcgccaggcggtcgcgggccacggtcacgccgcgccagtgcggcgacagctcacgctcatgctcgccacgcgcactgcgaatggctgcagcagtgcgttcgcgcagggtctccagctggctgcgaccgtcgttcatcacgcggtagcggccttcgaaccccaggcacatgcacaggtacaacagctccagcagatacagacgttcccgtgggctttgcaggcagtggtccaacagttggaagaccttttcgccgccccaggcttcgttgtgcacggtgatcagcaggctctgtttgccccagtcgctggtactgccccagggcgtgctcaataccgcttcatccagcgcggtgcacagcgcgtaacgcgccagcagcacttcgttacgggcgatgccagcggcttcggcacgctcttcgaactggcgcaggtaggccaacagctgtgcgcgcaggctggccggcgccgggtgggcgatggtgttgcgcaggcgcgtcagcagcgccagcaaagggccggcggcgctttccagcgggttgaggccgtggctcttgccggtgagcatcggcgcggccggcatggccagcggcgaaggttcggcacgcacaggttccggcgcccggccacccggacgcggcatgaactgggtgcggtcatcatcattgggatgcatcgcggattatcctcggatcgcccagaaggccaggttcaaacccgggaactgcccggcgatatggaaggcgaagccgccggaattgcccagctgttgccaggcctcgctgccgcgatccagctcgtaataggtcgaacctgcgtgatacggcaattggcgcggcgccactggcagcggcaacaggctgatgcccggcagttgcaggttgaccaggtcgcggatgtgctccaccgagccgactttgctctgctggccgaagcgtgcgcgcagggtttcgccgggcacatcggcgcgcaccaccaggatgaaactggcgttgtcgagcagggtcttgtcggccagcatcgccacgtgcacgccgtaggctttctcgacaatcgggattggcgtggccttgctgtcgatcagcatcgacagcgcttcgcgcaatgccgccatcaccggcgcgaagctcagggccaggtcgtcgtgctggtactgcgggtattcctgggggcgacggccggaggtggagaaggtcgagaactcgccggccaggctgaccagctcgctgaagaagcgctccgggtgcaacgggctcaactggctcaaatgctggaccagcggttgggcacggttgaccagttgcagcagcatgaagtcggcaatctccgacgcgccaccggcgcccgatgccaccacccgccccgccagagcttcgccgcgctggtgcagcaggccgagcagttcgctgcgaaaggcggtgagcggtttgctcgcggccacatccaataccggcgggatgtaggtgtcatcgagcaccaatgcgcggtcggcacgtttttccttgatgcgcaccaggcccacggcggcgtaatcgctgatgccatcctgggcggtgagcaggcgcagggcgcgggaacccacggccaccggggcgcggttttcgaagggtgcgttgtcatcgcgcacttcgcgcacctggctcacataacgcgcagcctccagggcttcgccttcatccacggtatcgcgggcgccggcgcgcttgagcggcagggccaggtacaccaggccgtcgcgcaggttgtcgtcgatgttcagcgggcttggtgccaggtcatcctgggggatattgaacggcgtaccgtcgggcaacaggccacgcgccgatacgatcgccagcttgccctgggccagcaggccctggtcgatcagcagctcggaaaacccccaggcgcctgcggacaacgggcggctgcgggcatcgatcaggttttccaggtaacggtcatgctgctggaagtgctgcgttccgatgaacatgccttccgaccagaccacgcgattgttccaggacatgggggctccgattgcttcttattgggcagggctggatggggtggccacgacgtcggcgcgcacagcacgcacatcgaggctgatctggtattcggtgtactggcgcgcgggcacgttgagcaccgtacgccattgcgcacgatccaactcgcgatagcccaccagcaagccgatctggcgcgtggacgggtcgaggtcgcgctggatgctcagttgctcgccgggttgcaccatcacttcgtcctggtccagcaggtccaggcccagtgtggattgcgcacggtcggccagggcgaagtaatcggagcgggcgaaggtggcggcatttttcagttcgaaaatgcgcacccgcaccggggcggcctggccgttggcgccggggttaagcccgctgatcgcatgaaagtgcagctcgacggcggccgtgtccacttcggcctcggcggctgtttcgggtttgacggcgtctttggcacacgccgtcagcagaaacacggtggcgactgcgagtaaaaacctgggaatcatcctgcgtcctcaatgacgtacttagctatccgttaaatccatgtgctgcggttcagcgtcgctgtcgtgcgctgtgttcttcgtaggctcggctgaattcgcggccgaacaggtcctggaaatcttcctgggcctcgcgggaaatattgctgtagagctcggtgaactgctgccagtactgggcctggcgcgaaccattgaaaaggctcgacagcccgccgggcttgcccatgcgttcttccagttgggccggctcgaagcgactgagcaggtgcttgatcgccgcttccacgccggccatcaccgccaactggtgggcacgcaggtcgttgaaactgtcgcgcacggcgaggtcgggtgccataaacgcctggttgccgtggcgcaggagcagcagtaacgcttcgtcggcattcggggcgaatttcaacggattgttttctgccggctggatcatggtctgctgcatgcgaaactcgcccttgaggctggcacgggcccgcagcacgtcgatcaggccttcgaccatcaggcggtagctgcggccgatgttttccatctgggcctcggcctgggctttgtccaggcgcagttgatccaggcccgcgccgcgcaggaaggcttgcagcaggtccggttgctggctgtcggccacggggggcgggggctcgaccacggggggcggctggatgaccggtggcggcgcaggtggcggcgcagcgctgacgacgggtgctggcgtgtcgccaaacaggtcccagtcttcgggaatcaccgcgcccgacaccaccggcggtgccactaccggcgcagccactggcgtcggcggacggaagtcatgttgctcggaaggcacgtggtccggcacggtcggtggcggtacggcggtggggctgaggaagtcgaacaggtccggcagcgtgtccatcgatgaagcgccctggaactgcggcgcgatcacaggggtggaaacaggcacgggcttattcgacacggcacccatcagcgcttcgaaactgttcggcgcctcgccggcaaacggctggctgtcgacggcctgtacgttgaaatcgatacgcgcctggatctcgtaatcgccgatgcggatcagctcgccatcctgcaacagctcgctgttacctctacgcaaacgaataccggcgttaaccaactccacgccgttggtactgttatcggttaaataataacggccatctttgtattgaataacgcagtgctgcgaggagaccagacgctcaggatcaggcaatacccagtcattatccgagctgcggccgatagccatcgagccctgattcatggacttttcggagcactgcccaggggtaatcttgtgataactagtgatagtcaaacacagcgacatcttgcctccttgctgatacttcgcgcgcggtcgattcccgggacagcgcttcccgggatatccccatcaggtcgagcaatcgaccgtccaaaacctgccaataccagcatgatcgctgatcttaactgggctctatgacaaaaatcctgtcccggtacgtcgttcgacccactagtcgcgcaggttgttaagcaccgcacatctgtcacagagggcgaatagcttaccttgacaaggcataagtactacaccaaaaatgcacaacttcttgaataccagtgatggcacattagtggcgtcttgcttatatgaccaagaaaacatgcaaagttccttgcgcaactaatgcatgaattgcccgccatctaacgggctgatagggagatcaaattcagtggatgtgccgttgctgctcaccgccgtttccgcgacttcgccctgtggcgaagacatggaatatgacgcgcaatttctgcaattggagcgtgatgccaagggccaacccgagcgcagcatgggcgactcgatcctgcccgctgaaccgccggaatggcgcagcatccagcagcaaagcctcgacttgctcgcgcgcagcaaagacctgcgcatcacccatttcctgctgcaaagcgccctcgccctccaaggcgtggccggcctggccgaagcgctgacgctgatcgatgcgttgctgcgtgattactggtccgacctgcacccgcgcctggacgccgacgacgctaacgaccccaccgtacgcatcaacgccctcaccggcctgacctgcgacaccaacatccgcctgctgcgcgaaagcatcctcacgcgctcgcgcaccttcggccccgtgagcctgcgcgccgcgctcaacgccagtggcctgttgagcttccccgatgaacaactcggcgcgcagcagctcaacgcggcgttcctcgacagcgaccccgagcagctacaggccacccgcgacgcgctgatcgcggcgcgtgcggcgtgcgaagccatcgaacaacaggtcaacgatcaggtcggttccgcccagggcgtggacctcagtgccttgaagcaaccgctcaagcaggcgttgcagatactcaaccaagcggtgcccggcgccgccggcagcagcgaacccgaggccgtcagtgacgacaatgccccctcggccgacttcgccgccgcccccgcagcaccgcgtcccgttggcgatatcgccagccgcgacgatgtgctgcgcagcctcgacaagatccttgcgtactacacccggcacgagccttcgagcccgctgccggtactgttgaaccgggcaaagaatctggtgcatgccgactttgcggccatcgtgcgcaatctgattcccgacggcatgtcccaatttgaaaacctgcgcgggccggacggcgagtaagccatccgactgtgcagtaacaacaccgtcgctcaagcgaccaggagcagcaacgtggcgaagcaaagttctcagaaattcatcgcgcgcaaccgtgcgcctcgagtgcagatcgagtacgacgtcgagctctacggcgccgagaaaaaggtccagctgcccttcgtaatgggcgtgatggccgacctcgccggcaagcctgccgagccgttggcgccggtggccgaccgcaagttccttgaagtggacgtcgacaacttcgactcgcgcctcaaggccatgcagccgcgcgtggctttccacgtccccaacgagctgaccggcgaaggcaacctgagcctggacatcaccttcgaaagcatggacgacttcagcccggccgccgtggcccgcaaggtcgactcgctgaaccaactgctcgaagcccgcacccagctggccaacctgctgacctacatggacggcaagactggcgctgaagaaatcatcatgaaggcgatcaaggacccggcactgctgcaagcacttgccagcgcgcctaagcctgcaggggaccagtaatcatgactgacaataccgcccgcgaaggctcccagatcctgggcacccagaccgaagaagccagcgagttcgccaacctgctgctgcaagagttcaagcccaagaccgagcgcgcccgcgaagccgtggaaactgccgtgcgcaccctggccgaacaggccctggcgcaaaccgacctggtgtccaatgacgcgatcaagtcgatcgaatcgatcatcgctgccatcgacgccaagctgaccgcccaggtcaaccagatcatccaccacccggatttccaacagctggaaagcgcctggcgtggcctgcactacctggtcaacaacaccgagagcgatgagcagctcaagatccgcgtgctcaacatctccaagccggacctgcacaagaccctgaagaaattcaagggcaccgcatgggaccagagcccgatcttcaagaagatgtacgaagaagaatacggccagttcggcggcgaaccctacggctgcctggtgggcgactactacttcgaccagtcgccacccgacgtggaactgctgggcgagctgtccaaagtctgcgccgccatgcactccccgttcatcgctgcggcctcgccgaccgtgatgggcatgggctcgtggcaagagctgtcgaacccgcgcgacctgaccaagatcttcaccaccccggaatacgccggctggcgttcgctgcgtgaatcggaagactcgcgctacatcggcctgaccatgccgcgcttcctggcgcgcctgccgtacggtgccaagaccgacccggtggaggccttcgccttcgaagaaaacaccgacggtgccgacagttccaagtacacctgggccaacgccgcgtacgcgatggcggtgaacatcaaccgctcgttcaagcactacggctggtgctcgcgcatccgtggcatcgagtctggcggcgaagtggaaaacctaccggcccacacgttcccgaccgatgacggtggcgtggacatgaagtgcccgaccgaaatcgccatcagcgaccgtcgtgaggcggagctggcgaagaacggtttcatgccgctgctgcacaagaaaaataccgacttcgccgcgttcattggcgcgcagtcgttgcagaaaccggccgaatacgatgacccggacgccaccgccaacgccaacctggccgcgcgcctgccgtacctgttcgccacctgccgtttcgctcactacttgaagtgcatcgtgcgcgacaagatcggttccttcaaagagaaggacgagatgcagcgctggttgcaggactggatcctcaactacgtggacggtgacccggcgcactccaccgaaaccaccaaggcccagcacccattggctgccgccgaagtgatcgtggaagaagtcgaaggcaacccggggtactacaactccaagttctacctgcgcccgcactaccagctcgaagggctgaccgtgtcgctgcgcctggtatcgaagctgccttcggcgaaaagcgcgtaaaccaccgatgagctagctcttctgtgggagggggcttgcccccgatggcatcaccggggtgtaactgacacaccgaggtgcctgcatcgggggcaagccccctcccacacaaaagcactgcccatttggagttaatcaaattcagtggcccacgccacacagggagaaaacatggctgttgatattttcatcaagatcggcgacatcaagggcgagtccatggacaaggcccacaaggacgaaatcgacgtgctgaactggagctggggcatggcccagtccggcaacatgcacgtgggcggcggtggcggcgcgggcaaggtgaatatccaggacctgtcgctgaccaaatacgtcgacaaggcttcgccgaacctgatgatgcactgcgccagcggcaagcacatcgacaaggtcaagctgaccgtgcgcaaggccggtggcgaaagccaggtcgagtacatggtgatcaacctggaggaagtgctggtcacctcgctgagcaccggcggttcgggcaccgatgaccgcttgaccgagaacgtgaccctgaacttcgcccaagtgatggtcgactaccagccgcagaaagccgacggcaccaaagacggcggcgcgatcaagtttggctggaacatccgttccaacaccaagcgctgatagcctttatggccgtggcatcgcgccacggccatacgtcctctgtccctctcgcaacccgtccgtggagctgctttggtgatcactgaaatcgcttcccgcgaccgtctgcaaccgtccctgttggaccggctgacggacgacgatccaaccaaccccaaggaaagcgccgacaaacgcgtgctgtccctgacccaattgaaagcctcggtactgcgtgacctggcgtggctgctcaacaccacgtcgttgctcgatgccgatgccacgctgcacaccccggccggcacctcggtggtcaattacggcctgccggcgctggcgggcaacagtgtttccagcgtggatatcaaggcgctggaagccctgatctaccaggccatcgccacctttgagccgcgcattctgcgccacaccctgcgtgtcaaagcccgtgtcggccatggcgagatgaaccacaacgccctgagtttcgagatcgaaggcgacctgtgggcccagccggtgccgttgcgcctgttgctgcaaaccgacctcgacctggaatccggccacgtacgcgtggtgaatgccgaccagcggaggcgcccatgaacccgcgcctgctggagctgtacaaccaggaactgcaccacgtgcgcgaaagcgccgcggagttcgccaaggaatacccgaagatcgccagtcggctgaccctgtccggtatggactgcgccgacccgtacgtcgaacgcttgctcgaaggctttgcctacctcacggcccgcgtgcagctcaagctcgacgccgagtacccgaccttcacccacaacctgttggaaatcgcctacccgcactacctggcaccgacaccgtcgatgacggtggtgcagttgcagaccgacccggacgaaggctcgctggccagtggtttcccgctgcctcgcgacaccgtattgcgcgctgcgctgggccgcgaaacccagacctgctgcgagtaccgcaccgcgcacccggtgacgttgtggccgttgcaggtgagcaacgccgagtacttcggcaaccccgccgctgtgttgggccgcctggccgccagcgagccgaaagccaaggccggcctgcgcctgaccctgcgcaccggtgccgagctgccgttcaacagcctcgacctggataatctgccgctgtacctcagtggcgccgacgagcaacccttccgcctctacgagcaactgctgggcaacgcctgcgcggtgtttgcgcgcaagccgggtggcgattgggtcgagcgcctgccccaggacgcgttgcgctcccgaggcttcgacgacgccgacgcggccatgccggtggtggcgcgggccttccagggctatcgcctgctgcaggaatacttcgccctgccccaccgcttcctgttcgtcgagttcgccgagctgagccgtgcggtcaagcgttgtgacggccaggagctggaactgattgtgctgttcgaccgccacgaaccgagccttgaaggcagcgtcggggcagcgcagttcctgccgttctgtaccccggcaatcaacctgtttcccaagcgcgtggaccggatccacttgtccgaccgggtcaacgagcaccatgtgatcgccgaccgcacgcggccgatggatttcgagattcactccttgagcggcatcaccggccacggcaccgggccggagcaaccgtttttgccgttctacgcggtgcgcgacccgtcgcgttatggccgtgaccaggcctattacaccgtgcgccgcgagccgcgcgtactgtccagcgaccagcgccgcaacggtccgcgctccacctatgtgggcagcgaaaccttcgtcagcctggtagacagccggcagtcgccgtaccgccacgacctgcgccagctcggcgtgaccgcgctgtgcaccaaccgcgatctgccgttgttcatgagcgtgggcaacggcaagaccgacttcaccctggccgacagcgcgccggtattgtcggtgcgctgcgtggcaggcccgagccgcccgcgccccagccacgcgcatgacgccaaggcctggcgcctgatcagccagctctcgctcaactatttgtccctgagcgaacagggccagggcgccggcgccttgcgcgaactgctgcgcctgtacggcgacagcaacgacgcagcgctgcaattgcagatcgaaggcctgcgcgacgtcagtagcaaagccgtgactcgacgcctgccgatgcccggcccgatcgtgttcggccgaggcctggagatcaccctggaattcgatgaaaacgcgtttcgcggcaccggtgtgttcctgctcggtgcggtgttggaacgcttcctggcacgctatgtgtcgatcaacagttttaccgagacggtgatccgtaccaccgaacgcggcgagatcatgcgatggaaagccaagcccggacgtcgtccgaccctgtgagtaccctggatgcgatgcaccaggagccctgggaatacgatttcttccaggcgctgcggcgtatcgagtgcgaatcgccggagctgccgcgcctgggccattccctgcgcctggcggatgaccccctgcgcctggggcagcaggccgattgcacgtttgctccggccacgctggcctcggtcgaccccggcggcgacggcaagccggcgcgcctggagcagttcttcttcggccttggcggccccaacggccccctgccgctgcacatcaccgagtacgtgcgcgagcgtcagcgcaacaacgccgacagcaccagcaagcagttcctggatgtgttccaccatcgcctgctgagcctgttctaccgggcctgggccgaggcgcggccgacggtcagccacgaccgcccggacgatgactactggtcggcacgcctcgccgcgctgagcggccggggcatgccgagcctgctgaatcaggggctgatcccggataccgccaagctgcactacagcggccacctgtcggcgcaaacccgctacccggacggcctgaaggcgattctcagcgagtatttcggcctgccggtagagatcgaagagtacgtcggccaatggctggaactgcccgaacgcagccgcgtgagtgtgagcgccaaccgcctgggcgtggacttttgcctgggcagcttcgtgtgggaccgccagcacaaattccgtatccgcctgggcccgctcacgctggatgactacatgggcatgctgcccggccaccagccgttcaacgaactggtggcgtgggtggccgagtacctgggccatgaactggactgggacctgaacctggttttgcaacaacccgaagtcccggcgctgcaactcaacggccagttccgcctgggcttcaacacttggctcggcaaacccgagcatgacgccaacgacctaatcctggcccggcactatgccgaccacgccaccacctcaaggaatccagagcatgggtgaaatcagtcgcgccgcactgttcggcaaactcaacagcgtggcctacaaggccatcgaagccgccaccgtgttctgcaaactgcggggcaacccgtatgtggaactggcccactggtttcaccagttgctgcaactgcaggactcggacctgcaccgcatcatccgccagttcaacgtcgagccggcgcgcctggcccgcgacctcaccgaagcgctggaccgcctgccgcgtggctcgacgtcgatcaccgacctgtcgtcccatgtggaagaagctgtcgagcgcggctgggtctacggcagcctgatgttcggcgaaagccaggtgcgtaccggttacctggtgctcggtattttgaagacaccgagcttgcgccatgcgttgctgggcttgtctgccgaattcgacaagatcaaagccgaggcgctgagcgaacgctttgacgaatacgtcggtgattcgccggagaatgcgttgagcgccagcgacggtttcaatgccggtgttccaggcgaagccagcggcgcgatggcgccgagtgcgatgggcaagcaggaagcgctcaaacgcttcaccgtcgacctgaccgaacaggcgcgcagcggcaagctcgatccgattgttggccgtgatgaagagatccgccaactggtcgacatccttatgcgccgccgtcagaacaacccgatcctcaccggtgaagccggcgtgggcaagaccgccgtggtcgaaggcttcgccctgcgcatcgtcgccggcgacgtgccgccagccttgaaagacgtggaactgcgcagcctcgacgtgggcctgctgcaagccggcgccagcatgaaaggcgagttcgaacagcgtctgcgccaggttatcgaagacgtccaggcctcgcccaagccgatcatcctgtttatcgacgaagcccacaccctggtgggtgccggtggcgccgccggaacaggtgatgccgccaacctgctcaagccggccctggcccgtggcaccttgcgcaccgtggccgccaccacctgggccgagtacaagaagcacatcgagaaagacccggcccttactcgccgcttccaggtcgtgcaggtcgccgaaccgtcggaagacaaggcgctgctgatgatgcgcggcgtggcctcgaccatggaaaaacaccaccaggtgcagatcctcgatgaagccctggaagcgtcggtgaagctgtcccaccgctacatcccggcgcgccagttgccggacaaatccgtgagcctgctggacaccgcctgcgcccgcgtcgccatcagcctgcacgcggtgccggcggaagtggacgacagccgtcgtcgtatcgaggcgttggaaaccgagttgcagatcattgcgcgtgagcatgccatcggtattgcgattggtgcacgccagaccaacaccgaggcgctgttgaatactgagcgtgagcgtctggcgaccttggaaagccgctgggccgaagagaaaaccctggtcgatgagttgctggcgacccgtgcaacgctgcgcgaaaaagcaggcgttgtggacagcggcaacgatgagttgcgtgctcagttggtcgacctgcaacagcgcctcaccgaactgcaaggcgaaaccccgctgatcctgcccaccgtggattaccaggccgtggcctcggtggtcgctgactggaccggcattccggtcggccgcatggcgcgcaatgaattggagacggtgctcaacctcgaccagcacctgaaaaaacgcatcatcggccaggaccacgccctgcagatgatcgccaagcgcatacagacctcccgcgccggcctcgacaacccgagcaagccgattggtgtgttcatgctcgccggcacctcgggggtgggcaagaccgaaaccgccctggccctggccgaagccatgtacggcggcgagcagaacgtcatcaccatcaacatgagcgaattccaagaggcgcacacggtgtcgaccctcaagggcgcgccaccgggttacatcggctacggcgaaggcggcgtgctgaccgaagcggtgcggcgcaagccctacagcgtggtgctgctggacgaagtggaaaaagcccacccggacgtgcacgagatcttcttccaggtgttcgacaagggcgtgatggaagacggcgaaggccgggtgatcgacttcaagaacaccttgatcctgctgaccaccaacgccggcaccgagctgatttcccacgtctgcaaagacccggcgaacatccctgagccggaagacatcgccaaggccctgcgccagccgctgctggagatcttcccgccggccctgctcggccgcctggtgaccattccgtactacccgctcagcgacgagatgctcaaggcgatcacccgcctgcaactgaaccgcatcaagaagcgcgtagagaccacccacaaagtggccttcgactacgacgacgcggtggtagacctgatcgtctcgcgctgcaccgaaaccgagagcggcgggcgcatgatcgataccatcctcaccaacagcctgctgccggacatgagccgtgagttcctcacgcgcatgctggagggcaaggcgctggcgggtgtgcgcatcagcagccgggataacgagctgcattacgacttcagcgattgacctgtcgaaatgtgattaaaattgtgggagggggcttgcccccgatggcgtcgggtcagccagaaatttctaacctgatacaccgctatcgggggcaagccccctcccacacttgattcggtttcttcagttatcaagtcatttacgggttaaccgatgctattcaaccaagcctcacgcctggccaagatcaccagccccctcgggccggatgtgctgctgctcaatgaaatgggcggcggcgaagagctgggcaggctgttcagttacgagctgcaactgacgtccctggacgccaacatcgacctcaaccagttgctcggcaaacccatgagcgtgggcctgcaactggcggacggcggtgaacggcacttccacggcatcgtcgcgcggtgtagccagaacatcgaccagggccagttcgccagttaccaggtgaccctgcgtccgtggctgtggctgctcagccgcacctccgattgccggattttccagaacctgagcatcccgcagatcatcaagcaggtgttccgcgacctgggcttttccgacttcgaagacgccctgagccggccgtaccgcgagtgggaatactgcgtgcagtaccgcgagaccagcttcgatttcgtcagccgcttgatggaacaggaaggcatctactacttcttccgccacgagcaagaccgccatgtgctggtgctggccgatgcctacggcgcccacaccacggtgccgggctacgcgtcgatcccgtattaccccaaggacgaacagcagcgcgaacgcgaccacatgcacaactggcacctggcgcaggaagtgcaaccgggttcactggagctcaacgactacgacttccagcgccccagcgccagcatcgacgtgcgctctgccatgccgcgcccgcacaccgccggcgactacccgctgtacgactaccccggcacctacgtgcaaagcgcagacggcgaacattacgcgcgcacgcgcatcgaagccctgcaaaccctgcatgaacagatcgagttcagcggcaatgcgcgggggttgggttcggggcatttgttcagcctcaccggcttcagccgccaggaccagaaccgcgaatacctgatcgtcggttgccgctactacatcgtccaggaaagcctggaaagcggcggtggttcaggctctgcgcaatttgaaagcagcctcacgtgtatcgacgcccagcagagcttccgcccgttggccagcacccaccgccctatcgtcaaaggcccgcaaaccgcgctggtggtcggccccaagggcgaggaaatctggactgaccaatacggccgcgtgaaggtgcacttctactgggaccgccacgaccaatccaacgagaacagctcgtgctggattcgcgtgtcgcaatcctgggccggcaagaactggggttcgatgcagattccacggatcggccaggaagtgattgtgagctttctggaaggtgatcccgaccgaccgatcatcaccgggcgggtgtacaacgccgagcagaccgtgccttacgacctgccggaaaacgccacccagagcggcatgaaaagccgttcgagcaagggcggcacgccggccaacttcaatgaaatccgcatggaggacaagaaggggttggagcagctgtatatccatgccgagcgcaaccaggacatcgtggtcgaggtggatgagagccattcggtggggcatgaccgcaacaagagcatcggccacaacgagacggtgaccatcggcaacaaccgcctgcgcatcgtcaagcaggaagacatcctctcggtgggccagcgcaagaccgacagcatcagccagagctacgtcatagaagtgggcgaaaacctgcggctggtgtgcggcgaaagcatcctggagttgaacgccagcggacagatcaacctcaccggcgtgcagatcagcttctatgccagcggcgacgccgagttcaacacaggcggcgtgctgcacctgaacaacggtggcggccccggcgccacacccgatggccagggccagaaagccgccatcgacgccaatatcaaagccgcgttccccgcgcctaaaagctcctgacgagacctgttctcatgacgtatcgaatcaacgaattccagtttcaactgcccgccagcgagttgcaggacgcgacgatcaatatcctcaagttccctgaattgggcacctccctgatcgtcagccgtagcctgctcgccgagggtgaaaccctgcacagcaacttcaatgaccagctccagcgcctggaaaaacaggtacaggatctgcgttatcagccgggcgttgatgtgcgcctgggcgccgcgcaagaggtcgaaggcattgagctgcgcagccagttcaacaagggcaatgacaaggtgttccagtatcaactggcgctagtgctaccgggtacgcgcaagatgcttgccttgagttacgtgaaagccgacaagctcggggatgccgaggcggcgcattggtcgacgatcaagggctcgctcgtgttcgacgtcccccagtgaagcggcctttgcatgtctgacgcactgctctgggctgcgcgcctgggcgatgggctgtcccacacctctgtcatggcggacatcctcggcggcgtactggaggtggcggccaatgtggcgattactgcattggcgaccgctgcggtggtggcggctaccggcattaccgtcgcgaccggtggactgggggcctgcgtgctgggggcggtcgtcggcgtcatcgtcggcatcgccatgagcaagaccggggccgacaaggggttgagcgccatgtgcgaaggaatcggcaacgcgctgttccctccctcggtcatggccacgatccttagcgggtccaccgacacactgatcaacgccttgcccgctgcgcgcgcggccggcgtcgtgccctcccacgttgcacctgcgggcaccgaaaccgaagcgccgccgccagcaccggaacacagccaagagcccggctacctggacatggccaaaggattctttgcgcaaatgtggcgccccaccgtcgccacgccagcgccaggtgcagtccctaaaccgctggacgtggtgacctgcacaaaacacccgccgatgccgccgcagtttctggccgaaggctcggaaaaggtcacggtcaacggtcaaccggcggtacgcagcggtgaccgcagcacctgcgatgccaccgtggtgtcgtcagggctgatttcgcccaatgtgactatcggcggcggctcagtcgtggtgcgcgagatccgcagcggcaagacgccgggggttggcctggccgtcactgcgctgatgatgctcaaggggggtaaaggcaagttcctcagcaaccttccctgcatgctgctggcaggtgtcaattcgtttgtggtcagtcaggccatgggcgcactggccaacgccgccatgggctcttccaacccggtgcacgcgagcacgggggccaaggtgctgggcggtcccgaggagctggatttcgccttgcccggaatcatgcccatcgactggcagcgtttctacaacagccgagatgaacgccgcgatggcttgtttggtgccggctggagtgtgccctatgaagtcagcgtgcagctgctgcctcactctgaagggggcgactacgcgttgtacatcgacgagcagggtcgacgtatcgacatgggttcgatccctttgggcggtgccgtgttcagcgctggcgaaggcctcagcgtcaagcgtcacttgaacggccagtggctgatcgaaagcgcagacggcttgtaccggctattcgatccggcgccacaggactcatcgttgctacgcctgagccaactgggagatcgcaacgacaaccgaatccacctcgactatgccgacgatggtcgcctgctgggcctgcgtgacacctttgacctggtcagggtcgagctgacctacgacagcacttggccccggcgcgtcagccggatcgaacggctgtatcccgaccaccaccgtgaagcactgatgcattacgcctacgacgtccgtggcgacctggccgctgtacgccagtccgacgggcacgtgaagcgccgttttgcctatgatgccgggcagcgcatggtcgagcatcaactgcccagcggcctgcgttgcttctatcagtgggccagggttgacgaccgtgaatggcgtgttgtgcggcattggacggaggccggggacacctacacattcgactatgcgctggacaccggcatcacccgtatcaccgacgggctggcgcgtgtcagcattcgacactgggatgagcgacaccagatcatcgcgtccaccgatgcactggggcgaacctgggccttccggtggaatgatgaaagccaactactgggcgcaaccgaccctctcggtgggcattatcagttcagctacgacgatgccggcaacctgactgagaccctcgaccccctggggcgcagtgaatcgaccttgtggctggagcactgggcgctgccactggcggagaccgatgccgctggcaatacctggcagtaccattacgactcgcggggcaactgcattcgcgaaaccgacccgctgggcaaccgcacggtctatcactatgacggacacggccaggtcagggagatcatcgacgccagcggcaagcgcaagaccttgcgctggtccccactgggtcaattgaccgagcacaccgactgtacgggcctgaccacccgtttgagctactgcaagcgaggcttgctgctggccagtaccgacgcgctcggggaacgcaccaccttcaagtatgacgaccagggccgcctgatcagcaagcagttgcccgatgggcgcaacgagcactatcagcgtgacgtcagcggccagttgatcggctacagcgaccctgccggccacaccacgcgctttgagcatgcgtcgaacggccagttgcgccaacgcatcgacgcccatggccgccgtgtggagttgagccacgacgcctatggccgcctgcacagcctgaccaacgaaaatggcgagcgctaccgattcgactgggacgacggtgatcgcctgaccctcgaacagcgcctggacggctgccggaaacggtacacgtacgacccgctggacaatgtcacacaggtagaaaccctcgcatcgtccgacaccgagcccgccatcattcatgatctggagcgggacgcagctggccggctgatcgccaagcgcaccgtggatggctgcacgacgtaccgctacgatgagctcgaccaagtcacagccatcacctttacaggccacgacggcgagcagcaaaccctgggcttcggttatgacgccctcggccagctgacccttgaacaaagcgccgccggttgcctggagcatctctacgacgaattgggcaacctggcccagacccgccttcccgacggccgctggctcaaccgcctgcgctacggtagcgggcacttgcatcaggtcaacctggatgggcaggtcatcagtgacttcgagcgcgaccgtctgcatcgcgaagtgctgcgcacccagggccgcatcagcacgcgttgcgaatatgaccgcagtggacgtctgcgcgcccgccagcgccgccaaccggaccattcactgttacatccaccggcgcagacacgcctgggctatgacgacagcgaccaactggtcgaacgctacgacagccagcccggcgcggcacaccgccaattactgcattacgacgccaccggccgcattctggctagccaggacaacctcttgggccaacgggaagccttccgctacgacccggccgccaacctgttggatggctcaggacaggtcgcccacaaccgattgctgacctaccaggacaaacactaccgctatgacggttttggccggatggttgaaaagcgcagccttcggcgcggcacccagcgcttcagctacgacgcggagcaacggctggcacaggtgcataacgatgacggctcccgggtcgtcatgacctatgacccgctgggccgacgcaccgccaagaccacctacgactgcaacggtgtgcagcgcagccagacacgtttcacttgggacgcgttgcaactcgtgcaggagcactgcaatcagcagagcagcctctatatctatgccgacgagggctacgaaccactggcccgtgtcgacggcatgggtcacctgcaaaaaatccgctactaccacaacgacctcaacggattgcccgaacgcctcaccgagagcgacggccatacggtgtggcaagcgcgctatgaagtctggggcaataccgtcgaggaaagccgagaaccctacttcatcgaagaacagaacctgcgtttccagggccagtatctggaccgggaaacggggctgcactacaacactctgcgcttttatgacccggatatcgggcgcttcaccacacccgatcccatcggtctggccggcggcctgaatctctaccaatatgcgcccaacccgctgagctggattgacccgttgggcctgatgaaatgctccagcccacccaaggggcgcaaggtcagtcgcaccgtgtatcggttcgaggaaccggggcgcatcgggaccacttggcaggcacacaagtggaatgtggagtccacccaccgctacaccaccaaaggcgtcggcggggtgtatggcgcgaactcacggaaaaccgcgctgggcgaggtcacgcactggaaggtcgacctgtccaaacgggtgttggtcagcaagaaagtgcagctcaataatgtcctggatctgacccgcgccgatgtgcgcaaacagctaggggtcagccttaaaagcatcaccggctcgaagtacaccgagacccatcagatcggcaattgggccaaggccaacggctatgatggaatcctggcgccatcggcacgcaacccgaccggcagcaacttgatctcctttgcaggtttttgaacatggaacgactggaaaacgaatacccgggtgacgcggactggcagagcacagtggccctgtatgaagaggactaccttgacgacgatgcgcgtgaactggccaaggccttgggcggccatctcgacctggcagtgatactgcgtggaaaacgaggccttgaagaggggttgtggtggatcgggcaaaaggttccggcactcgacaacctcaccccgctggagtgcctggaaagtcccacgctgataaaacgcttgaagacagcactgatgcgcatgccataacacccaaggacacggcgactatggaaagttgtgcgttcaattcaatcagacacaggagtgcagtgcgtgtctgatgcactctgggcggcccggatgggcgatgcgctgactcacacctcgatgatggcggacatccttggcggggtgctggaggtcgcggccaatatcgcgatcacggctgtggcgacggcggctgtcgtcgccgccactgggattaccgtcgccaccggtgggcttggctgtttcctgcttggtgcagtggtgggcacgattgtcggcctggccatgagcaagaccggggccgacaaaggcctgacgaatttatgcgatacgttcgccaacgcgctgtttccgcccacggtgcaggccaatattcttaccggcgccaccgacactctcaccaacaacatcccggccgcccgcgccgccggggcgatcagttcccatgtcgcgccggccgggaccgaactggaagaacccacacccgagccggaagccagctatctggatatggccgaaagtttcttctcgcagatgtggcgccccacggttgcaaccccggcgccgggcgccgtgcccaagccgctggacctggtggtgtgcatgaagcacccccctatgcctccgcagttcctggccgagggctcggataaggtcatgatcaatggccaaccggcagtgcgcagcggtgatcgcagcacctgcgatgcaacggtggtgtcgtccggcctgatttcctccaacgtgaccattggcggtggctcggtggtggtgcgcgagattcgcagtggcaagacgccgggcgtggggctggcggtcacggcactgttgatgctcaagggcggcaagggcaagtttttcagcaagttgccgtgcatgttgatcggcggcgctacgtcgatggcggtcagcagcgcgatgggggccgtggcgaacgcagcgatgggctcttcgaatccggtgcatgcggccaccggcgcgaaggtgctgggcggcgatgatgagctggatttcgtcctgcccggcatcctgccgattgattggcaacgcttctacaacagccgcgacgcacgcacgggcagtcttttcggcgcaggctggagcgtgccgtatgaagtgtgcgtcgacatccagcctcaccccgatggcggcgaaacgctggtctacaccgatgaacaaggccgccccatcgacatgggctcgattcccttgggcggcgccgtgttcagcgcgggtgaagggctggccgtgcggcgacatctcaatgggcagttgctgatcgaaagcgatgacgggttgtatcgcttgtttgaaccctctgccaacccgtcgttgctgcgccttagccagctcggcgaccgaaatgacaaccgcatccaagtcgactacgacgccgccgggcaactggtgcgactgcgcgataccttcgacctggtgcaggttgagttgatccgtgatcagggccagttggcgcgcatcgaacgcctgtaccccgatcagcgccgcgaagtgctcgtcagctatggcttcgacgcgcagggcagcctggctgaagtgcgcgataccactggccaggtccagcggcgtttcgcctacgacagtggccagcggatggtggagcatcaactgcccaccggattgcgctgcttctatgagtgggccttggttgaagacctggaatggcgcgtggtgcggcactggaccgacgaaggcgacgcctaccagttcgactatgacttgcaggccggtatcacgcgaattaccgatggcctgcaacgcgtcagtacccggcattggaacacccaacaccagatcattcgatacagcgacaatctcggccacacctggctgttcgaatggaacgacgagcgccagttgctcagtgccactgatccgctgggcgggcgctttgcatacagctatgacgaggccggcaacctgatcggcgaaaccgacccgctagggcgcagcgattcgaccttgtggcttgagcactgggcactgccactggtggagaccgacgccgccgacaatagctgggcgtatcgctacgatcagcgcggcaactgcatcgccgaaaccgatccgctgggctacgtcacccgctaccgctatgacgaccacggtcaggtcgtggaaatcatcgatgccaccggcaaaagcaaaaagctgcgctggaatccgttcgggcaactggtcgagcataccgactgctcgggttacccgacgcgtttcagctatgacgagcgcggctatctgcaggtcatcaccgatgctctcggcgaacgcactcaattcagctatgacgcacaggggcgcttgctcaccacccagttgccagacggtcgtatcgagcagtaccagcgcgatacgagcgggcaactggtgggttacaccgacccggccggacataccacgttgtaccagcacaaccgtcgcgggcaggtacgccagcgcatcgatgcccatggccggcaagtgcagttcggctatgacagctatgggcggttgcaggcactgatcaatgagaacggcgagcgatatcgtttcgcgtgggacgctggcgatcggctggttgagcagcaagacctcgatggcagcgccaagcgctacgattacgacgcgttggataatgtcacgacgctgacggccgttcccgcgccttacggcaatggcctggcgttggtgcccgacataccacccgcgcctatcgtgcatcgactcgaacgcgatgcggtcggccggttggtgaccaaaaccacggacgatggccgcaccgagtaccgctacgacgagctcgaccaactcactgctgtcaccttcaccgacctgcaaggcaacgcccaggccctgggcttcgcctacgacgccctcggccagttggtgaccgaacaaagctcggcaggcggcctgcaccaccactacgacgagctcggcaacctgatccagacccaactgccggacggccgctggctcaatcgcctgtactatggcagcggccacctgcaccagatcaacctcgacggccaggtcatcagcgacttcgaacgcgaccgcctgcaccgcgaagtgctgcgtacccagggccagctcagcacccgcagcgaatacgaccgcagcggccgcctgcgcgcacgtcagcgtcgtcacgccggtcaatccaccttgctgcccgctgcggcgcaaaaacagttcgagtacgaccccgccgacaacctgatcggcaaactcgaccagcagcccgccacgcaacaccgccaactgctgcactacgacgccaccggccgcatcatcgccagccaagacagcctgcacggccagcgtgaaaccttcgcctacgacgccgccgccaacttgctggacggcccgcaggctggcgcggggttggtggtgcataacaagctgctgacctatcaggacaagcgttatcgctatgacgcgtttggccgcacgattgaaaaacgcagcgccaaacggggcgtgcagcggtttgcctacgatgctgaaagccgcttggttgaagtgcgtaacgatgacggcagcgtcgtgcgaatgacctatgacccactgggccgacgcatcgaaaaaaccgagcatggccgtgacgggtatccgctgggagaaacgcagtttgtgtgggatggactgcggttgttgcaggagcataaacacagccagaccagcctctatgtttacgacgatgacggctacgaaccgctggcccgcgtcgacggccttggcccgttgcagaagattcgctactaccacaacgacctgaacgggttgcccgaacaactgaccgaggccgatgggcacagcgtctggcaggcgacttatcgggtgtggggcaacacactggaggaagtgcgcgagccttattacattgaagagcagaatctgcggttccaggggcagtacctggatcgggagacggggctgcatttcaatacgttcaggttttatgatccggatgtggggcggtttactacgccggatccgattgggtttgatggtgggctcaatttttaccagtacgcccccaatccaatatcctggattgatccatggggtctggcccccgagctttactatctgattgcgaagaaagatggcctttatgatgaaatggcgtggggccataaaaagccagttggtaaagtttatttgaagaaaggtgaagtctggaaagtcggtgaaactgtcaatccgaacaggcgatacacgcaaaagtggctcaaagctaacaacctcgcttacaaacgcgtgatggcggcccccacgaaaggcaacatgcaagtatgggaaaggctaaaaatcggaaagtatttcaaacgccgaggaaaactgcctccaggtaacaagtgcagacactgagatgaggattactttatgcgagtcgatacaacatcggactcacccagctggacaaaagtctttgaaatcactgacgagctaaatggcttgagtgagattcttgagaagaaatatccctccctcgactgggaacttgcagtctgcatgcgatgcctgcctcaggggctcgagcggaaaacattttgccgttactacaccaaagacaaaatgttcggcctggacatcgctatggacgaggaagatttcatcccgtacaaaaaggataaggccgctcaacgtaaattaatcggcgcagcgttttttgagttttttgttgagagcattaaaaaatacgaaaaaaagctccccaatcttcagccggtttcagaacaactgatcgccgatgtgaagcaatggtgtaccgaaaacgaatgggtagcctgaaatcccaaaaaaggctacggggtgccccacaaaaaatgggcacccaaccccgtcggcgtgcccatttttcctaccaccccgcccccttcgagacggtaacgctcttacgcgttaacagtgtctttcagcgatttacccggcttgaacgcaaccgtgttgctggccttgattttcaccggctcaccggtttgagggtttttgccagtgcgagcgccacggtggcgttgcaggaaggtgccgaagccaaccagggtgacgctgtccttgcggtgcagggcgcctgtgatttcttcgagaacggcgttgaggacgcggttggcctgttctttagtgagatcggctttttcagcgatggcggctgcgagttctggtttacgcataagtgaagcctctttgacggttttttgttgttatgtccgtgctgctctcttctggagcagcgcccaaagcgccgcaggctctactctgcggcagacgggagtgaggatggcatgccctcgcacgctccgccagtctagcggcgacctttctggagggaaaaacgtgcttattccgacagaacgaccggtatttacgccagcaacggcggaagttctttgttgagggccagtttttccatcacggcgctcccagtcagtgcgtaacccagcaggcgaccgctggcgtcacggcacagggccttgatgtcggcgccctcgccttcgacgctccagacaccttcggtgcctcgtggcggtggcgacaccaccagcgggcagatcggggttttcacggtcaccggcattgggccgtagctgacggcggtggcgtttccggccagggtctgagccagggcgcgggcgcagctcatcagcggcatcacgtacagcaggttcaggccgtcgacctcggcgcagtcgcccagggcgtagatgttggcgtgggaggtcttgaggtggcggtccaccatgatcccgcgattggtctgcaggcccgcggcggcggccaggtcgacgcgggggcgcaggccgatggccgagaccaccaggtcgcaggcgatcacttcgccgtccgacaggtgggcttccaggccatcagcgttgcgttgcaggcgattgagcaccgggcccaggtggaagcgcgcgccgaggccttcaaggcccgcctggactgcggcggcggcagccgggtgcagcagggtcggcatgacctgctcgcacggcgccaccaggtcgatttcataaccgcccaggatcaggtcattggcgaactcgcagccgatcaggccggcgccgagcagcagcacgcggcgcttgccggcagcggcagcacgaaagcgtgcgtagtcttcaaggtcgttgatcgggaaaatcaggtcagccgcatcgccttcaaccggcacacgcacggtttccgcgccccaggccaggatcaggtcgcggtaggccaccgcttcttcgccgatccataggcgtttgtggccggggtcaatgccgctgacgcgggtatgggtacgcacttcggccttgagttgctcggccatggcgccgggttcagccatgctcaggccatcggcttccttgttcttgccaaagccggtggagagcatgggcttggagtaggagcgcccgtcatcggcagtgatcagcagcaatggggtctcgctgtcgagcttgcgaaactcccgggccaggttgtaaccggccaaccctgtgccgatgatcacgacaggtgcgttcattcctttctccttgtaatacttttctgaaaatcgagaatcagccgatttcgatcatttcgaaatccattttgcccacgccgcagtccgggcacagccagtcttccgggacatcttcccaacgggtgccaggcagaatgccgtcatccggccagccatccttttcgtcgtagatcagcccacagacgacacattgccacttcttcattacttgcttcctcagggtccaggcatcttggccgacggtcgatagacccgcgttgccgtacggctcagggcgttttgtactgatcgtggccggcagatgcaagcatgatcgacgcaaacagccggttgcgtccggcaaaaaccctgatcgccatggtaagctcgccgcctcttttgctgccgatactgactcaccgtgccgcactcaatcgaccctgccgatgcttgccaatggctgccccagagccttctgagccccatacccgggccctcgacccttgattggttgttcgatacaggctcgatgacccagcggttgacccagctgtcaaacaacggcttcagcatcaccccgctgttcgagggttggcagccgctgcgggatgatgaatgcgtggcccttggcctgccgctggcgacagttggctgggtgcgcgagacctatctgcatggcaatggccaaccctgggtattcgcccgttgcgtagccgcgcgcagtactttgcagggtgacggcttgcacatggatgcactgggcagccgcccgctggggtctctcctgttcagcgatcatgcgttcaaccgccaggccatcgaagtgtgccgctaccccagccagtggttgcctgcggaccaccagattgaagggctttgggcgcgccgctcgcgctttgatcgcggcccgctgagcgtgctggtcgcagaagttttcctgccgggcctgtggcaagccgtgcacaaccatgcggagaattgctgatgtatcaacgtctgctcaagtccttgaaccacctgaaccccagggcctgggatttcattcagttgacccgcatggacaagcccatcggcatctacctgctgttgtggccgacgctgtgggcgctgtggatcgccggcaaaggctcgccctctttaatcaatatcgtgatcttcgtgctgggcgtggtgctgactcgcgccggcggctgcgtgatcaatgactgggccgaccgcaaggtcgacggccacgtaaagcgcaccgagcaacgcccactggtcagcggcaagatcacttctaaagaggcactggtgttttttgcggtgctgatgggcatcagtttcctgctggtgctgctgaccaacgccaccactatcctgctgtccctcggtggcctggcgctggcggcgagctacccgttcatgaagcgctacacctattacccgcaggtggtgttgggggcggcgttttcctggggcatgccgatggcgttcaccgccgagaccggcagcctgcctgccaccgcgtggctgctctatatcgccaatctgctctggacggtcggctacgacacttattacgcgatgaccgaccgggatgacgacttgaagatcggtgtgaaatccaccgccattttgtttggtgatgccgatcgcgtgatcattctgacgctacaagggctgtcgctggtgtgcctgttgctggcgggtgcgcgattcgagttgggtggctggttccacctgggtctggtggccgcggcgggctgttttgcctgggagttctggtatacccgggacaaggaccgcatgaagtgcttcaaggcgttcctgcacaaccactgggcggggttggcgatatttgtcgggattgtgctggattacgcgtttcgctgaggattttgtggcggctgtcgcgacctcatcgggggcaagccccctcccacagttggaatgtgttcgcctgtaggagggggcttgcccccgatgctttcagtggcgccgcgtgatcaaggtttggcgaccttccaggccccgtccattttgccctcaccggtcatgtcgcccgctttcttgtccatgatgaaggtatagagcggcttcccgctgtatgcccattggcttttttgatcgtcacgggtgatgacggtccatttacccataggcttgtcggtggattcggccatcagtgggggccagttggtggcgcacttgtcgttgcacatggacttgccatcggcgtccttggcaaaggtgtagagcgtcatgcccttgtgatccaccagcatcccgtctttggtcatcgccggctccgccgcgaacgccaggcccggcagcgtcaatgccgccgtcaccagcagggctttccaggaaatcgtgctgtaagtcatcggaaccttccttttgtggttgtcaggattcggactcaaagcgtagtccagagaggcgggaattgcccgagcgactaaattactgtcacacgactgcaataattccgttatctaatgcggcgcaagacagttaaatgacaagaggattttcgagcatggttggcaggagcattctgattgttgacgacgaagcgcccatccgcgagatgatcgccgttgcgttggaaatggccggctacgactgcctggaggccgagaactcccagcaggcccatgccattatcgtcgaccgcaagccggacctgatcctgctggactggatgctgcccggcacctccggcatcgaactggcccgccgtctcaaacgtgacgagctgaccggggacatcccgatcatcatgctcaccgccaagggcgaagaggacaacaagatccagggcctggaagtgggtgccgatgactacatcaccaagcctttttccccacgggaactggtcgcacgcctgaaagccgtactgcgccgtgccggtcctaccgatggcgaagcgcctatcgaagtcggcggcctgctgctggacccgatcagccaccgcgtgaccatcgacggcaaaccggccgagatgggccccaccgaataccgtctgctgcaattcttcatgacccaccaggaacgtgcctacacccgtggccaattgctggaccaggtgtggggcggcaacgtgtacgtggaagagcgcaccgtggacgtgcatatccgtcgcctgcgcaaagccttgggcgatgcctacgagaatctggtacaaaccgtgcgcggtactggttaccgcttctctaccaagggctgagccaatcgcagcctgacttaacagctgacaaggacgcatgttcaagtgaaccaaaactggcatggcaccctgatccgccacatgcttttgctgatcaccggctgcctgctggttggcctggtcagcggctattacggctggagcctggcagtcggcattgccctgtacctgggctggaccctcaagcaactgctgcgcctgcacgaatggttgcgccagcacaaacccgacgaagcgccacccgatggctacggcctgtggggcgaggtgttcgacagcatctaccacctgcaacgccgcgaccagcgtgtgcgcgggcgcctgcaagcggtgatcgaccgggtgcaggagtccaccgccgcgctcaaggacgcggtgatcatgctcgacagcgacggcaacctggaatggtggaaccgcgccgccgaaaccctgctgggcctcaagacgccccaggacagcggccagccggtgaccaacctggtgcgccacccgcgcttcaaggagtacttcgaacaggagaactacgaagaagccctggaaatcccctcgcccaccaatgaccgcgtacgcatccagctgtacctgacacgctacggcaacaatgaacacctgatgctggtgcgcgacgtcacccgcatccaccagctggaacagatgcgcaaagacttcgtcgccaacgtctcccacgagttgcgtacaccgctgacggtgatctgcggctacctggagacgctgctggacaacgtcgacgagatcaacccccgctggagccgggccctgcaacaaatgcagcagcaaggttcgcgcatgcagacactgctcaacgacctgctgttgctggccaagctggaggccaccgattacccgtcggacaaccacccggtggcggtgcagagcctgttgcagaccatcaagaacgacgcccaggccctctccggccaacgcgggcagcagatcaccctggaagccgacccggccgtattgctcaagggcagcgaaggcgagttgcgcagcgcgttttccaacctggtgttcaatgccgtgaaatacacccaggacaaaggcaatatccgcatccgctggtgggccgacgaccaaggcgcgcacttgagcgtgcaggactccggcatcggcatcgacgccaagcacctgccgcgcctgaccgagcgtttctaccgtgtcgactccagccgcaattccaacaccggtggcaccgggctcggcctggcgatcgtcaaacacgtgctgctgcgccatcgcgcacgcctggaaatcagcagcgtgctgggacatggcagcacgtttacctgccattttccgccggcgcagatgacgcgttcgcgagccctcagcaacgacgagtaatccaaatacaccacgggcctaaatgtgggagggggcttgcccccgatggcggcgggtcagatatgaatgcgctgcctgacatactgccatcgggggcaagccccctcccacaggggaccggtgttgttttagagagtgcattccagccccgcccggcagtgggcactaggcaagcgccccgtcagccgctacattggccgacttgcgcctgcctttcaggcccacctgccaccccttactgaacatacggaacctgcaaaaccccatcatggacccttcccctggtatcaccctcgcgacactcttcgccgacttcggcatgattctttttgcactggtcctggtactgctcaacggtttcttcgttgcggcggaatttgccatggtcaagctgcgcgccacccgggtcgaggccatcgcccacaaaaacggctggcgcggacagatcctgcgcaccgtgcacagccagctcgacgcctacctgtcggcctgccagctgggtatcaccctcgcctccctgggcctgggctgggtcggtgagccggccttcgcgcatatcctcgagccgctgctgggcgccgtgggcgtcgagtcgccggaagtgatcaagggcgtgtcgttctttgcggcgttcttcgtgatttcctacctgcacatcgtcgttggtgagttggcgcccaagtcctgggcgattcgcaagcccgagttgctgtcgctgtggacggcggtgccgctgtacctgttctactgggccatgtacccggcgatctacctgctcaacgccagcgccaacgccatcctgcgcatcgccggccaaggcgagcctggcccacaccatgagcaccactacagccgcgaagagctcaagctgatcctgcactccagccgtggccaggacccgagcgaccaaggcatgcgtgtactggcctccgccgtggaaatgggcgagctggaagtggtggactgggccaactcccgggaagacctggtgaccctggacttcaacgccccgctcaaggaaatcctcgcgctgttccgtcgtcacaagttcagccgttacccggtgtatgacgcggtacgcaacgaattcgtgggcctgctgcacatcaaggacctgctgctggaactggcggccctggaccacatccccgagtcgttcaacctggccgagctgacccgcccactggagcgtgtgtcgcggcacatgccgttgtcgcagctgctggagcagttccgcaaaggcggcgcgcacttcgccctggtggaagaagccgacggcaagatcatcggctacctcaccatggaagacgtgctggaagtactggtgggcgatatccaggacgaacaccgcaaggccgagcgcggcatcctggcctatcagccgggcaagctgctggtacgtggcgatacgcccctgttcaaggtcgaacgcctgctgggcgtggacctggaccacatcgaagccgaaaccctcgccggcctgatctacgacaccctcaagcgggtgccggaagaggaggaagtgctggaggttgaaggtttgcgcatcatcatcaagaagatgaaagggccgaagatcgtgttggccaaggtgctgctgctggattgaccgtcaattgcccaatgcaaagttgggcaatgcaccgaccggctggttgaactcatacggaatcgagaccagccccgcctcggtggcgcgctgcaccacaaaatgcaggtgcggcccgctgctgttgccggtattgcccgacaacgccagcggactgcccaccgccacacgctgaccgacccggacgctgaccgaaccttgcttgaggtgcaggtacacgccctcggtgccgtcgtcgtggcgcaccctcacgaaattccccgacgcatcgctgccgcgcccggcctgcgcgttttcggtcttcaccaccattccactacgcgccgcaatgatcggcgtgccttcgggcatggcgatatccatggcgtagcgacttttggcgtcggtgtggctgaagctgccgttggggccttgggtcatgcggaaggggccgccacgccagggcaaggggtagcggtaggcttgttgtgcacgattgggcccgggcacgacaagcatcggtcgctcaaccttgcgctcctggatcacaaacacctgggcgccaggcgtatgccggtcgctgataaacaccaggccattggcatcgacggatttgtagagggtcatggcctgggccgacatagcgaccgttgccagcccgcagcacagcaaaaagcgcatgagcatggcgtgaacctgccgggatgactgaacggcaggttagcgcggtttgatgacaacttcaggcaggcagcccgttgaaacaaatatccacgttcatttgggcagccgccgacaaattgaccaaggcatccagggagagtttgtcgatcttgcccgtgagaacgtcgttaagtcggggctgactgatccccagtctttgcgccgcatctttttgagaaagctcccagctgcgaatggtttggcacagctccaaaagcaattttgaacgcagccgcatattggcagcttgctggggtgtctcttccagagcgtcccaaacagagctgaaacgctcgccgtaaactttttgatttgccatgggctcaccctaactcctgcaatctggcgcgagccagctcgatatcacgcccttcggttttctgtgaggtcttgcgcagcgcgtgcaacacatagatggcctctggccggttgaccacatagaacacccgaaaagcacccgattcttcagtgatccggatctcactgacgcccctcccaatggtcttcatcggcttgcagtcaaagggttgctcaccctgctgcaagagatccaactgaaaacccactgccctccgagcatcgagcggaaacgctttgagatccttgagcgagcttcctagaaacaccacatccttgtgccttggcattggcttctcttctcctttcatggaaagaaaaagcgtaatcgacgattcggccaagagacgtggaggtttgtttcaaggcatagcaaaggctcgataacaccggagcgttatcgagagactatatcgaaacagatataaatcaaggcaggcaccgggaatcagacagtcggtcgattcccggcaatcagagaatcacgcacccggcacaaaatgcttctgtgctgtaccgcgcgcaatcaggcgggagatgtagtcgagcttctgcgcatcctggtcgataaaccggaaggtcagttgcagccaatcgctgtccggcttcggttcaaaggcgacgatggcgtgcaggtaaccattgaggcgggccacttcggcgttgtcgccttgttccaggtcgagcacggcgctttccaggacctggggcaggacttcaccgcgacgcaccaccagcagcgcttccttgatgctcagcgccttgatcacgcattgctgggtgccgctggacaggcgcaattggccctggccacgaccacccgccggcgcagccgctatcggcgcctgcaccggtgggctgttgagcaagcctttgttaggcgcaggcgcagcagcaacaggagccgcacgtgccacttcgggtttgccgccggtcagggcgctcaaggaatcgttgccgaacgccgagttcatcttggtcggcgcgctggcgaccagggcgtcgaggcggccgatcttgtgcagggcctgcttgaccttgttcagcaactgttcgttggtgaacggtttgctgacgtagcctgaaaccccggcctggatagcctggactacgttttccttgtcgccacggctggtgaccatcacgaacggcatggctttgaggtgaggctgctcgcggcaccaggtcaacagctcaaggccggacatctccggcatttcccagtcgcacagcaccaggtcgaaggtctcgcgcatcaggatggcctgggcctttttgccgttcaccgcgtcttcaagcttgatcccggggaagtaattgcgcaggcacttcttcaccaggtcgcggataaacgaggcgtcatccaccaccaatacactgactttactcatcgacccttcatcctataaaaacttcggcacgcaagacgcctgactgatggcattttgccaaaaactctgcagtcacgttgggactttcttgtgtcccctcgctgaaaaattcgcgcccgcaaacaaaaacgcccgaccaaaggccgggcgttaatttctcgggcaaccttacttatcgtcaggtacgcccggaacattagggatttgatcgactgaaccttcaacttcggccttcatgcgcttgaggcccatgtgccgtacgtcggtgccgcgcaccaggtagatcaccagttcggagatattgcgcgcatggtcgccaatccgctccagggagcgcagcacccagataatgctcaagacccgcgagatagagcgcgggtcttccatcatgtaggtggcgagctcacgcagcgcggtcttgtactcacggtcgatgaccttgtcgtactgggccaccgacagggccagttcggcgtcgaagcgggcaaaggcgtcgagcgcatcgcgcaccatgttgcgcacctggtcaccgatgtggcgcacttccacgtaaccgcgtggcgcttcgccttcttcgcacagctggatagcgcggcgggcgatcttggtggcttcgtcgccgatgcgttccaggtcgatcaccgacttggagatgctgatgatcaaccgcaggtcggacgccgccggctggcgtcgggcgagaatgcgcaggcattcttcgtcgatattgcgttccatctggttgatctggtcatcgatctcacgcacttgctgggccaggcccgagtcggcctcgatcagcgcggtgaccgcatcgttgacttgcttctccaccagcccgcccatcgccaggaggtggctgcgcacttcctcgagctcggcgttgaactgcgcggagatgtggtgggtaaggccttctttgctaatcatgttggcgtccttggagcgtccggtaaggtgcggagaaccgcagcgtcagtgcaatcagaaccacagcttcctagccgtagcgaccggtgatgtagtcttcggtctgcttcttcgccggattggtgaacagggtatcggtgtcgccgaattccaccagtttgcccatgtacatgaacgcggtgtagtcggaaacccgcgccgcctgttgcatgttgtgggtcacgataacgatggtgaacttggacttgagctcgtagatcagttcttcgactttcagcgtcgagatcgggtcgagtgccgagcagggttcgtcgagcagcaacacttccggctccacggcgatggtgcgcgcgatcaccaggcgctgttgctggccgccggacaggccgagggccgagtcgtgcaggcggtccttcacttcgtcccacaacgccgcgcctttcaaggcccactcaaccgcttcgtcgaggatgcgcttcttgttgatgccttggatgcgcaagccgtagaccacgttttcgtagatggtcttggggaacgggttgggcttctggaacaccatgcccacgcggcgacgcaactcggccacatcctcacccttacggtagatgttggtgccgtagaggttgatggcaccgtccacgcggcaaccgtccaccaggtcgttcatgcggttgaaggtacgcagcagcgtggacttgccgcagcccgacgggccgatgaaggcggtcacgcgctgcttggggatgttcatgctgacgtcgaacagcgcctgtttttcaccgtagtacaggctcaggcccggtacttcgatggccacggtttcctgggccaggctcaggctctgcttgtcgcgacccagggcagacatgttgatgccgtgggtgtgggtgtcttgttgcatgggatgctccctgtgctgttgtgtgggagggggcttgcccccgatggcagtgtgtcagtcagcacatctgtttctgatccgccgctatcgggggcaagccccctcccacatttattctgcgttcacttataaatcagctatccagcgccttgtacttttcgcgcaggtggttacggatccacaccgccgacaagttgagcgtggcgatcaccagcaccagcagcagcgcggtggcgtacaccagcggccgcgcggcttcgacgttggggctctggaagccgacgtcatagatatggaagcccaggtgcatgatcttctggtccaggtgcaggtacgggtagttgccgtccagcggcagcgacggcgccagtttcaccacgcccaccagcatcagcggcgccacttcaccggcggcgcgggccacagcgaggatcatgccggtcatcattgccgggctggccatcggcagcacgatcttccacagcgtttccgccttggtcgcacccagcgccagggagccctcccgcacggtgcggggaatccgcgccaggccttcttcggtggccacgatcaccaccggcaccgccagcagcgccagggtcagcgaggcccacaacaggcccggcgtaccaaaggtcggtgccggcagggcttcggcgaagaacaggcggtccaccgagccccccaatacatacacgaagaagcccaggccgaacacgccgtagacgatggccggtacaccggccaggttgttcacggcgatacggatgatgcgcgtcagggcgttctgcttggcgtattcacgcaggtacaccgccgccagcacgccgaacggagtgacgatcatcgccatgatcagggtcatcatcacggtgccgaagatggccgggaagatcccgccttcggtgttggcttcccgtgggtcatcgctgaggaattcccagaccttgctgaagtagaagccgatcttggtgatggtgcccatggcgtttggctggtaggcgtgcaccactttgccgatgccgatttccacttccttgccgttcgcatcgcgtgccgtcagggcgtcgcggttgaactgggcgtgcaggtcggccaggcgggcttcgatgtcctgataacgggcattcagctcggcgcggtcggcgtccatatcggcctgggcggcggcgtcgagcttgccttccagttccagtttgcggccatgcaggcggatacgttcgaggccggcgttgatcgcgccgatgtcggacttctccagagtcttgagctgggcagccagcttgttgacgcggtccacacgagcctgcagctccggccaggcagcctcgccttcggcaatgaccttgccatcctgcttgacgttgaccagggtgccgtagaagttgccccactcacgccgctcgatggtcatgagattcgctggcgtggtctggtccttgagccactcgccgacgatccaggtgaagtcgttgccgttcaggtcacggttgccgaccttgatcagctcgcgggtcatgaactccgggccttggtccggcaccggcaggccggcgcttttcaggcgctcgcggggcacttcttccttctgcaccacttcgccgatgacgatatggtttgcctggcccggcacgctgtagttggcctggatcaggtcggccggccagaagtggcccaggccacgcacggcaatcaccgccagcaacccaatagtcatgatgaccgcgatggacaccgcgccaccgctgatccagacaccgggggcgccgctcttgaaccatccattcagggagttctgtttcacagacttctacctttcttaaagcgacgagtatttcttgcgcagacgctgacggatcagctcggcgagggtgttcatgatgaaagtgaacagcagcagtaccagcgccgagaggaacagtacgcggtagtgactgccacccacttccgactcgggcatttccaccgcgacgttggccgccagtgtgcgcaggccttcgaacaggttcatctccatcaccggggtgttaccggtggccatcaacacgatcatggtctcaccgacagcacggcccatgccgatcatcagcgccgagaagatgcccgggctggcggtgaggatgaccacgcgggtcatggtctgccacggcgtggcgcccagggccagggaacccagggtcaggccgcgtggcacgctgaacacggcgtcttcggcgatggagtagatgttcgggatcaccgcgaaacccatggccaggccgaccaccagggcattgcgctggtcgtaggtgatacccaggtcgtgggagatccacatgcgcatgtcgccgccgaagaaccaggtttccaggtacgggctcatgtacagcgagagccagcccacgaacaggatcaccgggatcaaaatcgcgctttcccagccatccggtacacgcaggcgcagggattcaggcaagcggctgaagatgaagccggccaccaggatgccgatcggcaacagcatcaacaggctgaaaatccccggtagatgcccttccacatatggcgccaggaacaggccggcgaagaagccgaggatcaccgtcggcatggcctccatcaactcgatcaccggcttgaccttgcggcgcaggctcggggccatgaagtaggcggtgtagatcgcggcggcaacggccagcggcgcggccagcagcatggcgtagaacgcggccttcaaggtgccgaaggtcagcggggccaggctcatcttgggttcgaagtcggtgttggcggcggtcgactgccagacgtatttaggctcgtcgtagttttcgtaccagaccttgctccacagcgcgctccaggacacttccgggtgcgggttgtcgagcatcagtggttgcagcttgccgcccgcctccacgatcacgcggttggcccgtggcgacaggccgaacacgccctggccgtcgaccaccgggtccaccagcagggtgcggtgggcggtgctgtggaatacgccgaacttgccggacgcgtcgagggcggtgaagcctttgcggcgctcttcggcggtgatttcaatgatcggcgtggcgcccatctggaaggtacggatctgcttgaagcgctgctcgccatccgggtcgcgggccatgaaccactgggccaggccgcccttggagttaccgatgatcagcgagataccgcccaccagctgggtgctcgcggtgacttcagcattgccatcttccagcagtttgtagcgtccattgaggctcttgtcgcgcaggctgaacacatcggccaaagcacggccgttgatcacgtacagccattgctgacgcgggtcgatgaagatcgccttcaccggctcggtcatttgcggcagctcgatacgcttctgctcgctggtgacttcgccggtcatcatgttttcttcgcggctcagggacagcacgttcaagtgcgaaccggcggagcctgccaccaccagggaggagtccgtggcgttgagggccacgtgttccagcgggcggccggcgtcatccagcacgatcggcgtttcaccgtaggggtattcgatcgcgggggtgatggttttcttgccgtccgggtaggacaccttataggtgtggcggaacaccagggactggccgttggacagaccgaggatcaccagcgggctgccgggttggtcttcgccgatagaagcaacactggtgccggcgggcaggggcaggtcgacacgcttgagttcggcaccggtctcgacattaaagaacagcgcctggcccttgtcggaaacccgcatggcgacttggttctgttcttcgagggagatcatcagcggcttgccggcgtcctggatccaggccggggtcagggcgtcttccttggtcaacgaggcgccctggaacagtggcgcgaccacataagccaggaagaagaaaatcagggtgatggcgccgaggacggcgaggccgccgaccagcacgtaccaacgggtcaggcgatccttgagcgcgcgaatgcggcgcttgcgttgcaactcaggcgtattgaagtcaatgcgcttggggggagaagtcgtcgtcatggtggaattggccagatcattcatgcgcacaccctagcgatcctgtatgacagaaagatgacagtgcagtgacgcaacaaatccgccgcgaagcaaggctggcagcggactagaaaattcggatgcggggccggtacgccggccccgcagaggcaatcagttgccttctttcagacccaggtcagccaaggccttggcggcgactttggctggcagcgggatgtagccgtctttcacgacaacttcctggccctgtttggacagaaccagcttcacgaactcggcttccaacggggccagaggcttgttcggagctttgttgacgtacacgtagaggaagcgcgacagcgggtatttgccgttcagggcgttttcttcgctgtcttcgatgaagtcagtgctgcctttcttggccagagccacggtcttcacgctggcggtcttgtagccgatgcccgagtaaccgatgccgttcagcgaggagctgatcgactgcacgaccgacgccgagccgggttgttcgttcacgtttggcttgtagtcgcctttgcacagggcttcttccttgaagtagccgtaggtgccggacaccgagttgcgaccgaacagttgcaccggcttgttggccagatcgccggtcacacccaggtcgccccaggttttcacgtcggctttgccaccgcacaggcgagtcgaggagaaaatcgcgtcgacttgttccatggtcaggtgctggatcgggttgtccttgtgcacgaacaccgccagggcatccacggcaaccggaatcgcggttggcttgtagccgtacttctgctcgaaggccgccagttcggtgtccttcatcttgcggctcatcgggcccaggttggaggtgccttcagtcagcgcaggtggcgcggtggccgagccggcagcttgaatctggatgttgacgttcgggtattcctttttgtaaccctcggcccacagggtcatcaggttagccagggtatcggaaccaacgctggacaagttgcccgacacaccagtggtcttgacgtacgccgggattgccggatcaacaccagcggccaccgcgttggcggtcgcaacgccagcagcgacaaaagtcattgccgccatcaaacgtttcagtttcatgccttgctcctagcagattgggataattggatcggggccaagtatcgggaggccgtgtgaacactctatgtctggaatgtgacagttagatgaaaggccactattgggtgaggatttgcatttaagaagaaattttcagaaatgccggcctgagcgggaagataagtgtgataaggctctggcttgaaaccatgctgcaattgctgaccggagatttcccacagctttttagggttgtcgctcggaactggccttaataacctcctcctgccgctgcaaattcagcgaccgggactgcaagcccgccgaaactatgttgggagttcataagcgcctctataatcggagcgcttttatggccgtcgctttatggcggctgtgtgcgggagaccttcgggtctgccgggatgctcctaacctcggtcttgcagacccgcgcacagctgccacccatcatctgcaagtgatgctggccgctcccattttgttaggagcttttacgatgatcaaagatagccccaatcccccgctcaattcggctccactgcacgcagacgctcacagagccatcaattccaatccgacacgttctgctgaatccaccctatctgctgatgggctttttaccgtgcgtacagatctggatgccgagaccctgctggcaaacgcgtcccaggatctcacctcggtacaagtcttggctgcaaatttggcgttcgaggtcgacggtgctgcgcgagacgtggcgctgggaatatgccggatgcttgagggaattcagttattggtagatcggacgctggatcaatttgaaactcaaaacccgatggcaaaattatgaaatccgctccggtccaaagcctggttaaagtctgagcgattcacggcgaaccttaggttgacaaaacaaaaccaaagcatagtcttgtcaacctaaggagacctcacatgatcaatgaccgaattcgccgcgcaaggttattgcgtggcatgtcgctagaagcactggcactgcatctcggtgacataaccaagcaaggcctgagcaaatatgaaaaagggctgagtaccccaaactctcagcgtcttttgcaattagcaaaggcactggacgtgagcccggagtattttttccgcactcaggcactcccactcgcgccgctcgagttccgtaagcttgcgaagatgcctcagtaccgtcaggttcaagtcgaggagcagattcgagagcatctggaacgctatatatctcttgaagagtgtttcgacccaggagatatcaagactgccgaaaccccagcgcaaatgctccctgtgtcctccttagaagaagcggaacgagcggcggatgagctccggaagtattgggatataggcgaggaccctattgctcatctgactgagcagttggaagagcacggcatcaaagtggtgatgctggatggtcctgatgattttgatggcgcttgcgcagccaccaatgacggcgaacatgtgctgatcgctctaaatgctcagagagcaggtgaacgaattcgcttcaccgctgctcacgaattgggtcactgggtgatgaaattgcctgatgatatgcccgagcgcgataaagaaaattgctgtcaccgcttcgctggggctttcctttatccagctaaaagcgtgaccggagattttgggaatcaccaacgctcccgtgtccaccctagagaactattgattgctaagcgccaatatgggctctcaatgcatgcagcgctccgtcgattgaaggaccttaagctattaggcgaaggcggcttcaagtccctgactattcagttcagtagcaatggctggcgcaaagcagaacctgaaccattaccttgcaaaccacctcagcgttttgagtctctcgttttctgggggttagcggaaggtctgatcaccaaatcaagagcggccgagttgctgcgtcgcccggtgagagctctagatcccaattttctgggctcattggagagtgcatgagccttatctatatcagcgacaccaacatctggattgatttcaggaatgcgggattgctggagcatatattcaggctgccactcactttctgctgcaccgactttgtcatgcacgagcttgaggatttcccccatgatgaactactcacccaagggttggttgtcgaatcatttgacgagggaggagtgaaaaaactcttagggcttaaggtcgaacacaataatagttccttagccgatgtttcttgctacctactagcacaaacaaccggaaggccgttactcactggcgatggaaaactacgtcgtcaggccattcgggatggactacaggtacacggcgcactttggctgctcgacctaatggtcgagcatcaagtcctcaatgctattgacgcagcaacggcgttggagcatatgctaactgatggcgcccgcttaccagcatcagaatgtcaaataaggctcttaggttggagacctatatgaagctcaacccggatactgaatatccacccagcggttgtaaacatcaccatactcaccttccaaagcagaaaacttagtttcaaaaagctccatggctttgattgcgtcagctgacggataactcatgaagcgataccccgtcattaccctaaatttgaaatatccgaatccgtctgaaattattcgactgagatgagccaaatgaattgagtccctttcatcggcgcctcggaagtctcgctccatcggcattccaaccccaatgcagtcagcatgatgtatatgactagcgttcgagtattcatgtagcaacgctgcataacctttaaacaacgggtcgccactattcgtgagaccggcaatcaaaccagtgaacccccatctgcgctcaagttcttgacgagtttttctatcatatttctgatttacttcagctcttttttctggcgaaattaaaagatccttgatgggtttccactctcggtcatcaggattcgtcacagaattcaaaagctcttgagccttactatcgtttttcaataatgaaatttcaaaaaggtcagtatcaaactcttcaattcgccgcctaaaactctcacgcgactggagtatatacaatactttcagtgtaccctcgcacaccgaacgcatgattacatccgcatcccaaagttgaccgtaagcagacaataaaaatgcgctttccgtagatcgcgctgtcgccgataaaagctcaccgagaacttgccgttctcgcttgctgaattcagaaaaagctgacactggaaccattagtggcagcaactccctcattaacaaaaccgctttttcggaccactctttctgaattttaattagtacttccgtgtacatagactactcctgaacagactaccgtccgcgcttccacagatacccacccaccaccatccccatcacgcacagggcggcaacgtagtaggccgggcccatcgggctttccttcatcagcagcgacaccaccagtggcgtcagcccgccgaacacggcgtaggccacgttgtaggagaacgacaagccactgaaacgcaccacgggcggaaaggccttgaccattacgtaaggcaccacgccgatggtgcccacaaagaggccggtcagtgcgtacagcgggaacagccagtctgggtgggccatgaggctgtgatacagcgtccaggatgtggccagcaacagtgcgcaaccagcgaccagcacacggcccgcaccgaagcggtcggccagggcgcccgaagcgatgcaacccaggctcagggtgacgatggccaggctgttggcctgcaacgcaacggtcgggctgaagtggtagatggtctgcagcacggtcggggtcatcaggatcaccaccacgacgccagccgacagcaaccaagtcagcaacatcgacaagacgatggcgccacgatggtcgcgcagcaccgcgcgcaagggcagctcggcggccagggtcttgcgttgctgcatctcggcgaagatcggcgtttcatgcaaccagcggcgcaggtacaccgacagcaggccgaatacaccgccaagcaggaatgggatacgccaggcataatccgaaacctgctcagggctataaatagtgttgatggcggtggctaccaatgagcccagcaggatgccggcggtgaggccgctggtgagagtgccgcaggcgtagccgatatggcgtggcggtacgtgttcggagacgaacacccacgcgcctggcacttcaccgccaatggccgcgccttggatgatgcgcatcagcagcaacaggaccggtgcccacaggccgatctgcgcgtaggtcggcagcaggcccatgatcagggtcggcacggccatcatgaagatgctcagggtgaacatcttcttgcggcccagcaggtcgccgaagtgcgccatgatgatgccgcccagggggcgcgcgaggtaaccggcggcaaagatgccaaaggtctgcatcatgcgtagccattcgggcatgtcgaccgggaagaagagttttccgaccacggtggcgaaaaacacgaaaatgatgaaatcataaaactccaacgccccgcccaaggcagacagcgacagggttttgtagtcgttgcgggtcagcgggcgcgacggttgcgcactgcttgcgggcacggaggacatggcaaggcttctcttatagtagtcgggacggcaagcccgggacttgcggcaggcttggcaagatagcaaatcgctcgaaaaagcacagcgttgagcgaataacagttcaacagcgcgaaatattccgcatttttacgctttatctgcgcacagaagcacagttgccggaaaaagccgcgatacagccgttatttgccgaccaaatgagcgcccagaggtcgtcgtggcgccggggtctcgatatactcggcccgtgcaagcgcaagacccccagtcttgaggggctgctgtgccaaaacgtcgttgggcacccaccagccgatttggcagagtttccctttagtacgccttacgagaaacgcatcacgcggtgtatgttggtgctgaaacgtttttttcgaagacggctatccacttgaaatacccatgaagcgttacgggtcagaggcacccttggcatgatcgaactcgaacaagaagatcctatcccgcaaggcgatctcgccctgcaaatcaccgccctgccgcgtgaaaccaacggtttcggcgatatcttcggcggttggctggtcgcacagatggacctggccggcaccgccatggccagcaaggttgcaggcgggcgtgtcgccacggtggccattgatcgcatggcgttcctggtaccggtggccgtcggcgcgcagttgtccttctatacccaggctctggaaatcggccgcagctcgatccagatgatggtcgaagtgtggagcgacgacccgctgtccagcgaatggcgcaaggtgaccgaggcggtatttgtattcgtcgccatcgacggcagcggccgcacgcgctcggttccatcgcgcgcacgttaaacctcgccgggttttgacggtcaattgccccactgcctgctattgagagtgctttgttatgccgacgccccacgttgaaaccgtgaaaatcgacgagctggactgctggcgcatccgccacaacggcgcggaactgatggtggcccaacagggcgcgcatatattcagttaccagcgcgacggcgagcagccgctgatctggccgaaccctgaagcggtgttcaagcagggcaagggcattcgcaccggcgtaccggtgtgctggccgtggtttggcgtgttcgaccgcaacccgcagagcgtcaaggcgatgcgccagagcgaccagccggccggcgcccacggttttgtgcgtacggcactctgggaattggctgcgacggaactcgaaggccatgcgctacgggtggatttgctactgccggtgccgacgggcggttttccgggctggccgcaccaggtcgacctgaaactgagcctgctgctggacgatcagttgcatatccgcctgaccagtcataaccgtggcgctgacaccgtaaccctcagccaggcgctgcacacctactttgcggtgagcgatgtgcgcaatgtagaggtcgatgggctggacggcgtgacgtatatcgataccgcggacggctgggccgagaaggtgcaatccggccagctgcgcttcactgccgagaccgatcgcatctacctcgatacgccgtcccagttgaacatcgtcgacacagactggcagcgccgcatccagctcactgccgagggctcaaagtcgacggtgatctggaacccctggaccgaacgtgccaaggcgtttgatgacatggccgatgatggctggccgggcatgctgtgcatcgagacggcgaatgtgctggacgatgtggtgagcctggcgcccggcgaaagccacaccttgggtgtgaggatcagcgctgtcgccctgtaagaacgccaatcaaaatgtgggagggggcttgcccccgatagcnnnnnnnnnnnnnnnnnnnnnnnnnnnnnnnnnnngctatcgggggcaagccccctcccacattggttatatgttgccctttaaagatcggattccttgaccacccgcactttccccgcatccagcgcataggccgcatcggcaagatcgttattgaccttctccaccttcaacgtgcccgtgacccacagcggcgtgtagatatcatccagcttcagccccttgggatagcgcaccaacaccagttggttcggcggcggaggcggcacgtggatgcacgcgcctgggtacggcaccaggaaaaacaacgtgctgcggcctttggtatcagtttccaacggcaccggatagccgccgatgcggatgtccttgccattcatggccgccacggtcttggttgagtacatcaccgccggcaagcccttgctctgcttcaggccacccttgtcggtgaatgtgccttgggcttcgggggagttgtggtcgatctcgggcatggcttcgagggctttttgatccgacagcggcatcaggtcgagccagtcggtttccggcagttcgccagcgtgcgccaggccagagcccagcaggaggagtgttaacaaaagacggcgcatggagaggctcgacaagtacaggtggcgagcattctagctccctgcgcctgcgcagcgcagagagcttcgtcgcttagatcatttctttttcagcaggccgtagatcaccagcagcacgatggcgccgatcagcgcgccgaggaagccggcgccctggcctgcctggtagatgcccagggcctggccaccgtaagtggcgaccaacgaacctgcgatgcccagcaggatggtcatgatccagcccatgctgtcgtcgcctggtttcaggaaacgcgcgagcaggccgacgatcaagccgataaagatggttccgatgatacccatggcatttccctctgaatgtaggtgagctatgccaaagcctagtcaggctttggcatcctgcaatcagagagacgacggtcaccaatggttcccgtcggacttgccttattgctcggcgatcagcgcttcaaccttgaggatctgcgcttgcagcgtcgcgcggtccttgcagcgcaggttggcatggccgaccttgcgcccggccttgaaggccttgccgtagtgatgcaggtggcagtcgtcgacggcgatgactttttccacgggtggcaccacaccgatgaaattgagcatggcgctctcgccgaccttggccgtggagcccaacggcaagcctgccaccgcccgcaggtggttttcgaactggctgcactcggcaccttcggtggtccagtgcccggagttgtgcacgcgcggggcgatttcgttggccttgaggccaccgtcgacttcgaagaactcgaacgccatcacgccaacgtaatccagttgcttgagcacacggctggaatagtcttcggccagggcctgcaacgggtggtcggtactggccacggacagcttgaggatgccgctgtcgtgggtgttgtgcaccaacgggtagaagcgggtttcgccatcacgggcacgcacggcgatcagcgagacttcaccggtgaacggtacgaaaccttccagcaggcaggcgacgctgcccagctcggcaaaggtgccgaccacatcggcagcggtgcgcaggactttctggcccttgccgtcataacccagggtacgggttttcagcacagccggcaggccaatgctggcgacggcggcatccaggtccgcctgggactggatatcggcgaaggccggggtcggaatgcccaggtccttgaacatgctcttctcgaaccagcggtcgcgggcgatgcgcagggcttcggcgctcgggtacaccgggacgaactgcgacaggaacgcgacggtttcggccgggacgctttcgaattcgaaggtcaccaggtcgacttcgtcggccagttggcgcaggtggtccgggtcgctgtagtcagcgcgcaggtgctcacccaaggccgccgcgcaggcgtccggcgccgggtccaggaaagcgaagtccatccccagcggggttcccgccaaggccagcatgcggcccagttggccgccaccgattacaccgattttcatcgtcaaccacctcaggcgatgcgtgggtctggattgtccagcacgctgtctgtctgttcagcacggaattttttcagcaccgcgtggaactgcgggtgcttggcgcccaggatgctggcggacagcagggcggcgttgatcgcgccggccttgccgatcgccagggtcgccaccgggatgccggccggcatttgcacgatggacaacagcgaatccacgcccgagagcatcgccgactgcaccggtacaccgagcaccggcaggtgggtcttggccgcacacatgccgggcaggtgcgctgcaccgcccgcaccggcgatgatcacctcgatgccacgggattctgcttcatcggcatactggaacagcaaatccggagtgcggtgggcggagaccactttcacttcgtagggaatgccgagtttttccagcatatcggcggtgtggctaagggtggaccaatcggacttggagcccatgatcacgccaaccaatgcactcatcgtcgtgcctcttctctctgggcgcccgcaggcgcgtcaaaaaacaacaagccacgcgggaaatccggcgtggcttggtgtacgaattaaggccggttggaccggccgaaggccgcgcagtataccgtaataatccagataaacagcccctgggatgaccatctgtcttaagcgccaaagcggcagatttactgacttgcaggtcaacccggcggactttcaagaacatggaaacttcaccccgccaacatcgaatgccactaccgcatttgcctatgacaccgacaggcaatggcaggacccagccttatcgtgggcagcgacacaccccactgacttccccaaggacaaggactgccccatgcctgcatcggtcgagtattaccgcaccctacccgcgccccacgacatcctcaacctgacaccgcccgaaacggccacattgctgaggtcgctgaacaaaaacgtcacttacacccttggtcatatgccaacccgtccagtcagtgcgcttaagctgctgacccaggtactcacgcactccctgcccacgcccgaactggactgcatcttcttcgcctgcccgccatcggacgctaccccgcaacaaaccttgtacgagctctaccacaacctcgttctgttcaacgcgctgccctcgacctacgacgccagtacggcagtgttctacacccccggagcagacgccttgcaagccctgccgtccgactgccagacgcgattaaagatagccctgcagaacctccagggtatcgagttctacctgagtgacctcgccgacttctggcaagcccggcacgcctacgccgacatgaccaaccaggcgtacgtggcccgagccttcgcggcccagcttcagtgtgcggcatcgctcaggctggcagatggttcgctggaccatgaaagtgtcgcgttgatcacgcttctggcgtcgcctgggcatatttccggttgccatctctaccgcatcgcgtttcaggatgaagaacaacaggcgcacatccctctgtacggcgccttcctgatgacccgcactcccgccagcgcagtactcggtcaaaacccctgtgtcctttacgtgcccgggctcaagttgcaggcgttctactcgccggccctgctcagggcccacctgattgccgagttgagcgagaccagcctccaccgtctgctgccgtgtatcgaccgcaatcaactccagcgcttggaagagctggccaggcacgggctgcgggacgatcacgtcagcctgtcaccgatggtgttcagcccgcacttctatgaggacgtgaccctggcgctgatcaaccagcaacgccgagacatccggcacgcgtgggcatgggcgcagcctcggcatttccaggaggccaattggatcaaccgtcacatcgaggccgcctcggacctcaggtcattgatgacccttgaaagcaccttcaaagaccacacgacacccgccatcgcggcgtttgaacgaaaactgccgccccgcccagcgcccattcctgaacctgccgcgccgaagccgatcaacctgaacgtctacatccatcgtgatttgcacggcgatagccggctgtcgtccctgcgcgaagattatttttcctggctgcaaaccgagctggaagacctgtccggccggacagtcatgatcaccttccatcaggaaaccgggccagttgctttaatcgatttcaattacaaaggggacgaacaaaagagaagctctgcctggaaaaaaacggtgctccagtacctgcaaaacctttcgaccacccattcaccgcttgacctgtacctactgctgacaggtgacaacatcaacagtagagtcgccggcattgctaatgtgcgtggaagcttcggcattgccgcgacaacgtcataccgcatcgcagcccatgaagtcgggcatatgctcggcgcgctgcataaagacggcgacaatattttcaatggctggtggcacgaaaccctgatgaagaatcgtgactttttctcgttcctgaggggcaacgcctaccggttcagcgacaagaaccgggacaatatccgcacctacctgagccagttcgattgacgcacggctatacggcggggctcgccgccccgccttcgagcttgcgccacagcaaccgcacgttcgccttgcgtaccaaggcacagcggtacaggcggatttccagcggcacatgccattgcggcccgccgcacaccaccagctcaccccgcgccagctcggcgcgcacgctcaactgcggcacccaggcgatgcccaggccttccagggccatgctcttgaggctgtcggccatggcggtttcgtacacggtggtaaagcgcagcgcacgctgacgcaacagcaaattcaccgaacgaccgagaaacgcgccggcgctgtaggccagcaatggcacgctgccctcgccttccaggtcgaacagcggtttgccgtcggcatcggcggcacacaccgggagcatttcggtattgcccaggtgcagcgacgggaagatttccgagtccatctgcatcgcggcgtcggggtcgtagaacgccagcatcaggtcgcagccgccctcacgcaaagcatgcacggcgtcaccgacgttggtggccaccagccgggtggcgatgttcaggccttcgttgcgcagttgcgcgatccagcgcggaaagaagcccagggccagggagtgcgccgccgccacttgcatgacctcgccctgcccgccttccaggtgatgcaaatggcgcagcacttcaccgagctgctcgaccacggtgcgcgcggtgaccaggaacaactggcccgccgccgtcagctccaccggcgtgcgcgagcggttgaccagggtcaggcccaacgcggcttccaggctgcggatgcgtcggctgaacgccggctgggtcacgaagcgccgctccgccgcctgggaaaaactgcgggtcgccgccagggcgctgaagtcttccagccatttgctctcaaggttcattgctgcctcccgtgggtacgcaccattttggcacacacgcccgccatgataaccgggtcacactcacattatgccgtttgtgcataggccagtgcttaacagcattggcccaaaaagttctacaagcctagcattcgcagcgttccggccagttccgggtccatatcgagatgatttccgtcatgtcctccgctgcatctttccgtaccgaaaaagacctgcttggcgtactcgaagtaccggctcaagcgtattacggcatccagaccctgcgagcggtgaacaacttccgcctctcgggcgttccgatttcgcattacccgaaattggtggtcggtctggcaatggtcaagcaagcggcggctgacgccaaccgcgagttgggccagctcagcgaagccaagcacgctgccatcagcgaagcctgtgcccgtctgatccgcggcgatttccacgaagagttcgtggtggacatgattcaaggcggcgctggcacttcaaccaacatgaatgccaacgaagtcatcgccaacatcgcgttggaggccatgggccacaacaagggcgagtaccaatacctgcacccgaacaacgacgtgaacatggcgcagtcgaccaacgacgcctacccgaccgcgatccgcctgggtctgctgctgggccatgacgcgctgctggccagcctcgacagcctgatccaggcgttcgccgccaaaggcgtcgaattcagccatgtgctgaaaatgggccgcacccaattgcaagacgccgtgccgatgaccctcggccaggaattccgcgccttcgccaccaccctgggggaagacctggcgcgcctgaaaactctggcgcctgagttgctgaccgaagtgaacctgggcggcaccgccatcggtaccggcatcaacgccgacccgcgctaccaggccctggccgtacagcgcctggcggtgatcagcggccagccggtcgtgccggctgccgacctgatcgaagccacctccgacatgggcgccttcgtgctgttctccggcatgctcaagcgcaccgcggtgaagctgtcgaagatctgcaacgacctgcgcctgctgtccagcggcccacgcaccggcatcaacgagatcaacctgccggcacgccagccaggcagctcgatcatgcccggcaaggtcaacccggtcatcccggaagccgtgaaccaagtggcgttccaggttatcggtaacgacctggccctgaccatggcggccgaaggcggccagttgcaactgaacgtgatggagccgctgatcgcgttcaagatcttcgactcgatccgcctgctgcaacgcgccatggacatgctgcgcgagcactgcatcgtcggcatcaccgccaacgaagcccgctgccgcgaactggtggagcactccatcggcctggtcaccgcgctgaacccgtacatcggctatgaaaacgccacccgcatcgcccgtatcgccctcgaaagcgggcgtggcgtgctggagttggtgcgcgaagaaggcttgctcgacgacgccatgctcgacgacatcctgcgccccgaaaacatgattgccccacgcttggtcccgctgaaggcctaagcgtttgttgcaccgctcaccaggttgagggactagacacctctcaccttttgagggcctgaaggctcgttcttcaggcccttttttttgccccgaggttgtgaaatgaagcctataaaaacgccaatatcgctctgtaagtccaccacccagctgaaacctttaatcgccccgagcagacggatcacgttcgcctaggtatagtgccgcccctcttcgcgtcagagatcgtcggtaacgaggtcctggacagcgcgaaaccgcatgaataacaacacccgcaaaaggattggggtcgaagcgtcgtgcactgcctggtgctgagcgatagcgtcgaaccgtcctgcgtttgccattagaaaaatcagcgaggaacactccatgctcgaagtcatcaacgacttcctctcagggaaagtactgatcgtgctcattgtcgggctcggcggttatttcacgattcgctcgcgtttcgtacaactgcgtcacttcttccacatgttttcggtatttcgcgacagcctgaaaaacagctccgatcagctcagctccttccaggcgctgatgctcagcctggccggccgcgtgggtgccggcaacattgccggtgtcggtattgccgtgacactgggtggcccgggcgccgtgttctggatgtgggtcaccgcgctggtgggcatgtcgtcgagcttcatcgagtgctccctcggccagttgtacaagcgcactgacgccgagggcaccttccgtggcggcccggcctattacatccagcacggtttgcacaagcgctggctgggcatggtcatggcgttcctgttgctggtgaccttcggtttcgctttcaacggcctgcaagcccacgccgtgacccactcgctgaacaacgccttcggcctggacaccacctacaccggcctggccctggcggtactgctgggcctggtgttcatcggcgggatcaagcgcatcgcctcgattgccgacctgctggtgccggtcaagaccctggtctacatcgccgtaaccctctatgtgatcgtgctgcaattcgaccatgtgccggccatgctcgcgaccatcgtcaagagcgccttcggcctcgaccaggccttcggtggcctggtgggcagcgcgatcatcatgggtgtgaagcgcggcgtgttcgccaacgaagccggcctgggcagtgcgcctaacgtggcagcagtagcctcggttgagcacccgatcgcccagggcgtggtccaggcgttcagcgtgttcctcgataccttcgtgatctgcacctgtactgcattgctgatcctgctctccggcttctacaccccgggctttgaaggcgacggcattgccctgacccagaactccctggcggcggtggtcggcgactggggccgcatgttcatctcggtggccctggcgttgttcgtgttcacctcgatcatgtacaactactacctgggcgagagcaatctgcgcttcctggtaggcaacaaccgcaaggtgctgatgggctaccgcgccctggtgctggtgctgatcttctggggttccatcgagaacctgagcaccgtgttcgcctttgccgacatcaccatgaccctgctggcgttcgtcaacctgttcgccctggcgttcctgttcaagatcgccatgcgcatcctcaacgactacgacaaccagcgcgcagcgggcatcaagaccccggtgttcgactccagccagttccctgacctggacctggaccgcaaggcctggccggccaacccggtcaagcctgagccaggcactcaagcaagcgctgaactgaacgctcaagcgcaacgctgagcgtagatagatgacacgccgcccggccttgggcatgctctgggcccggcggcgtttttcgttcaggagaaaattcgatgtccccagctaataacgtgatggtgctctacaccggtggcaccatcggcatgcaggccagtgccaacggcctggcgcctgcgtccggttttgaagcacgcatgcgcgaacagcttgccgacgtgcaagtgcccacctggtgctttcgggaaatgtcgccgctgatcgacagcgccaatatgacccccgcctactggcagcgcctgcacgccgccgtggtcgaagccgtggacaacggctgcgacgccgtactgatcctacacggcactgacacgctggcctacagcgccgccgccatgagcttccaactgctcggcctgccggcgccggtggtgttcactggctccatgctgcccgccggtgtgcccgacagcgatgcccgggagaacgtcagcggtgccttggcggcactcggcgaaggcctggcgccaggtgtgcagttgttcttccacggcgcactgatggcgccgacccgctgcgcgaaagtccgcagctttggccgccatccgtttgctgccctgcagcgcaatggcggcgtcgcccaggccgaaatgatcccggccgccctgcattaccgccagcccaaagccgtggccaacgtgggtgtgctgccactggtgccgggcatcgccgccgggcaactggatgcactgatcgacagcggtatccaggcgctggtgctggaatgcttcggcagcggcaccgggccgagcgacaacccggcgttcctggccagcctccaacgagcacaggatcaaggcgtggtggtggtggcgatcacccaatgccatgaaggcggcgtggaactggatgtgtatgaagcgggcagccgcttgcgcggcgtcggcgtgttgtccggtggcggcatgacccgcgaagcggtgttcggcaagctcaatgcactgctcggtgccggactcgacaccgctgaggttcgccgcctggtggaactcgacctgtgtggcgagctgagctgatcggcctgtaacttgcttcccttccagccatcccctggctggaagcaccccatgctgcactcccacctgaccaccctcaacgccgtatccctggtgctcaacgccttcaaggccgaaggcttgccggcccaggaactgctggccggcagcggcatctgtgcggcggacttgagccgcgccgacacgcgcatcaccaccaaccaggagatgcgcgtgtgcgccaatgccgtggcgcggcgccgggatatcggccttgaactgggccggcagatgcatgtatcggcctatggcatgctcggctatgccctgctcaccagtgccacctttggtgacgccttgcgcctggcgttgcactacccggcgctgttgggaacacttttcgagttgagcctggaggaagacggccagcgcgtgtggttcaccgccggtgattatcgagaagacccggcgcttgagcgattcaatgtcgaactgtgcctggcctcgctgaaagtcatctgcgacgacctgctgggccagccactgccactgctcggcgcacgcttcgagcacgccgccccggactaccgcgcgcgttataccgaacgcttcccttgcccgttgcagttccaggccaccgccaacgcgtttgccttcgaccggcactggctcgaacaaccgctgccgctggcagacaccgtcacccaccaggccatggctgagcgctgccgcaaacagaacctggagttcaccgggcgccaggcctggctgggcaggattcgccagttgctcactgcgcaactcaacgccgcgccgggcctggaaggcctggccatgcagatgaactgctcggcgcgcaccctgcgccggcatttgcacgacctgggttgcagctaccaggagctgttggacgaggtgcgtttcgagcgcgccaagcaactgctggctgaggaccagtggccgatctaccggattgccgaagcgttggggttcagcgaaacggccagtttccggcatgcatttgtacgctggagcggcgtggcgccgagccaatttcgagcatgatgcgccattgaggggcgaattacggacaaacaatttggccatattcatccccttttggccgctcctgccgttctcttaaaccgcgcccaccgcaagactgcaggcaccgacccagcctgcggagaacaagaatgctgacgatctattcggacgatcaccacctgcaccacggccgctgcgaactgatggacgggcaactgatgccctgcttcgaaatgccctcgcgggccgaccatgtgctgcaacgggtcaaagaccgcgaactgggcccggtgcaggcgccacaggactttggcctggcgccgttgcaacgcatccacagccgcgattacctggacttcttcaaaggcgcctgggcgcgctggaccaaacacggccaggacggcgacctgctgccctacacctggcccgcgcgcaccctgcgccgggtgctgcccaccagcctgcacggccagttgggctactacagcttcgatggcggtgcaccgatcactgccggaacctggcaggcagcctactcggcagcacaagtggcgctcaccgcacagcaggcgatccagcacggcgcccacagtgtgttcgcgttgtgtcgcccgccggggcatcacgccgccagcgacttgatgggcggttattgctacctgaacaacgcggcgatcgccgcccaggcgtttctcgaccagggccaccgcaaggtcgcgatcctcgatgtggactaccaccacggcaacggcacccagtcgattttctacgaccgcagcgatgtgctgtttacctcgatccacgggcatccggaggccgagtttccgttcttcctgggctatgccgatgagaggggcgaaggcgccggggaaggcttcaacttcaactacccgctgcccgccggctccggctgggacacctggagcgcggcactggagcaggcctgccgggagatcgaacactacggcgccgacatcatcgtggtctcactgggcgtggacaccttcaaggatgacccgatctcacagttcaagctcgacagcccggactacctgaccatgggcgcgcgcatcgcacgcctgggcaagccgacgctgttcgtgatggaaggtggttacgcggtggaagaaatcggcatcaatgccgtcaacgtgctcgaaggttttgagaggtcagcccaatgaacatgctcaagtcgcttgtgctctgcgccgccgtgctgagcagcgccgcgtacgccgaagaaaaaaccctgaaggtgtataactggttcgactacatcacgcccaaggcgctggaggacttcaaggcgcagaacccggcgatcaaactggtctacgacatcttcgacaccaacgaagcactggaggccaagctgctgaccggtaactccggctatgacgtggtggtgccgtccaacgtattcctcgccaagcaaatcgaggccggcgtgttccagcccctggaccgcaaccaattgcccaactggaaccacctcgatcccaagctgatgaagctgatcgaggccaatgaccccggcaataaattcgccgtgccctacatgtacggcaccatcctgatcggcttcaacccggccaaggtcaaggccgcgctcggcgacaacgccccggtggacagctgggacctgatcttcaaggaagagaacatcagcaagctcaagcaatgcggcgtggccctgctggactcgccttcggagatcctgccgctggccctgcagcacctgggcctggaccccaacagcagcaaccccaaggactacgtcaaggccgaggcgctgttgatgaagatccgcccgtacatcacctatttccattcgtccaagtacatggccgatatcgccaacggtgacatctgcgtggccgtcggttattcgggcagtttttcccaggcggccaaccgggccaaggaggccaagaacggcgtagtcgtcgacatgcgcctgcccaaggaaggcgcgccgatctggttcgacatgctcgccattcccaaaggcgcgcagaacccgcaggacgcctacacctttatcaactacctgctgcaaccccaggtgatcgcgccgatcagcgattttgtcggttaccccaacccgaacaaggacgccaccgggcaggtcgacccggcgatccgcaacaaccccaacctgtaccccaccgaagcagcgatggcgaccctctataccctcaaacccctgggccgtgatgccgagcgcgccaggacccgcgcctggaccaagatcaagtccggcacctgacgggcctacataaacaccgcctgcctgactgcgcgctttctagcatggctacacccggggcctggcctcgggttttgtccatcccacgcatgtcaggctcccctatgacttcaacccaaaaagcctctgccacgcagcagccgccgcgctactactccaccgccaccttgatcactcaactgtccaccggcccggcgtttcgggaagtggccgccgtattgctgcgacgtgaactcaaggcgcattacccgaacctggatatagacccgaacatcaccctggtggaattggccgatcgcgaatcggtgtccaacgccgacgcacgctgggccaccttcaagcacaccggttggttgatcttcaacgcggccttgccattccttggttcgacggtgggggggcgcggcgtggatctggcaaatcatggatcaactgcaagaagtcgtggaggccgaaggcgacccgcaacaccgctcacgctggagcgccatcgccgatctgctgctcaacctgggcatggcgatcacgttgcaccgcgtgaccctgcgcccgttggagtcagagcctcccaccctcgccaagctacccaaaccggtcgagcccaagccggtagaacggattgacttctacctcagcgagatcggcctggagccggcgagccggctgtttttcgagaagaaaaagacctgattccgccgttacttatctaccgtcccagccactcctgctgtcgctaccgtgcgcgttcgctgttcgccctggccaacgacagaaggagccgccaatgtccaaaaacgcgcacaacaacaataaccacaccctgaacgggcgccccaccaacgcctacgaattactcacccaattgaccaccggcccgtctgcccgggaagtggcgtcctacacccttcgctgggtactgaaggagcagtaccccacgctcaatatcgacccggacctgacgatgatcgtcactccgcgctggcatgttcttgagtcggtcatcatgccggttccgccccacgtcgaatccatcacgacggtgttggcacgccagatgctgtcgcccacccctgtgttctaccttgagggcgagcacttcctcacgctgcatcctgagtcccccacagccgtgcacttgccggtgaaaatcgatgccatcgcacgcctgatcaatgagttggccggcctgctgttcgccgccttccaggagcgccaactggactactggaatgcatcgaacggcaacagttggccgcgttggcagaccttctcccattcattgcgcaagtcctggaatgtcaccaccgttgaagactgggatgtgcttgagtgtgaaatggccagagggctttatcggtttccattgcgcgcccaacgcagggtcaaggatcgctacaacagccgcgcctacgtggtggatgtcagcctgctgcgcgacgacgtcaccgtgcatgtgggggtgctggatatggcggtgctgatgggtgagttcaacgaacagacgatgatcctggcgtactcactggtcagtggctacgagcgcttcggatctctcgaagagctgggcaaggcactgccggccaaggtcgtgcaactgcaatcggatacaacattgcagtggaagttgtacgagcccgccgacagctttttcgacagcctcgcctgtgccctgatagccatgcaaatccaagccatcggtgaggccgagaggttcgttgccgcttccaccgcaccgcagcctgagatgccaaccactctctcccggattgtgcccagcattgaagacctgagcgaccatgcgctctcccatatccgccagatacatcaacaaatgccggactggctggccaatgcttcggaccaggacatcgccctctacagccgctacatcattgaattggcacagatccacgcgttcaacgaaggccgttcttttcaggacggaatcccgccaatacgcgactacgcccttgagaagctgcaggagcagatccgcgctcacaaagaaggtgcacacctgaacctgaacaaggttgcagtgacgatccagagcccagtgatctggggcaccttcgcaataccgggcgaggtggatgtgacccagcgcagcctgatcgacctggtcctagagaacctcaccggcctgcccaccggccaacccacggtgtactacaacggttcagtggcgccgcaatggttgaacttcaggttcctgaaggaggtgatcggcacagtcgatatcggcgaacactacccggcgctgatcaagagcacgttgctcgacgacccggtccagtcaagggccaggcaattgctgtacatcagtcatttacgcgtgcaactgccactgttggctctgcaattgaagatccagcaacgccagggcatggacgaactcggctaccgctatgtcgccgcagtgatgcaggtagagaagcaagaccagcaggttgacgggcagccgatcgtgatccgaccgcttgcctttgtcccgacattgcgcagcggcattcagggggatgaagtcgccaatatgtttgtgatcggcccgctggacccttccgccggcccctgcgtgctgtaccgccccttgctcgaaccagtgcttgcccagttcccatcccggcaaaacctgctgtacatgatcaagcaggaccaagacctgcgcgaatcagtgctggcctggttacccgaagacgtccgcttcaactacgagcagtacgtgtttcccgacaccctgccgtcgccttggaccgttgtgcgagtgattgtcgagccggcgacggtggtggatatgagcggacctatcgaattgagcgacgacgtgttgggcgacggcgccctgatcacgctgttcaaggccaacgccaacgcgatggtcgagttggcgacccgtcaatcgatctccaatgagcagaagcgctgggcgacctttcgccagaccggctggcagatcttcaacgccgtgctgccgtttctggggcctaccgtgggggttgccgcgtggatgtggcaaatcatggaagacctggagcaggccgagcaggcggtggacaaatccgacaaatccgagggctggaacgcgctcgtcgacctgtggctcaacctcggcatggcattggccctgcacgtagggctgcgtcatccaacccgtgagcccgtgaccgaaccctccaaaccccggcttgaacccatccccgagaaaccgatcaagcccaaagacccgctaccgcagccccccgtggtcgccaaccagcaattgccggacctgccgggcaccgacctgaccccgttacaccaggaaaccctgcatatcagcggcgcactcagtcgcgcgccttcgagcctgggtacacggctggacacattcaaaaccgacaaacccgccacccttggcgagcagaacagaacacccggcgttcatctgcatctgtatccggacaaggacaagtggtacgccccggtcggcgagcgctggttcgaggtcaatctggacgacaacgacaacgtggtcatagccgaccccaacgaccccgcgcgcactggcccgttgctgatcagcaaccggtccggccaatggttcgtcgacgtacggctacgcctgcgcgggggaggctttcgcaatcggcggcgtgccgctcaggggcagaagccgcagcgcatcactgagctgaggaaaagcctcactgacttcgatgccaacgagagtcgtcgccaggcggagctttccgaatccctcgctgccatcggctccgaacctggcccctcgaccgcgcaaaggcgcgatgcctatatcggcgacgtcgaccggcggctggaggaatacgacgtgccaatccgccaactcacggcactgggcgttatcgacacggtgcccaactaccagatcgccatggtcgattatttgaacaaacagttgctgctcacccgctccgccgtcgaggagcgcctgcgcccctatcgagacaccttgctcgatacggtcggcttgctggacgaagcaacctccgagatcccccagagcaccaccgatctggcccaggaaatgtccacgctgaacctggaaatgatcagccgcctggagtacgtcgactcacgcttcaaggaactttcgaagctgggcagcgccggtgcgcaggtgatgcagacaacttccaaggcactgcccaacctcaacctgcacgacctgaaagccttgcaaataatggtgtcgcgcttcctgtgcatcaaaaacggcaacgcgccggaacagcagcaggcacgcacccagctgagcaccatcgtgggtatggccgacctcgctgtgcagagttacctcgataccctgcaaaacgatgccgacagccccttgtcggagcgtatcgaggtgctcgatagcctcgtcgaccaattcaccactgtcgaccagcgcctgcttgacctgcatgccgatgcacccgaacaggtgctcagggaaccgctcaacgacctgttacaactcgtcgacgaattcaaccaacgtgcgactcacgacttggcgcgactgttgcgcgaacgcaaggcattggagcccaagccaggcccctctcggcccgcaccggtggcacctcgcaaggtcatcaagacacgctttcacggcgttgtggtcggcgagccacgcgagtcggacccttccctggtagatgtcaaagcaccgctgaccggcaaggtgatagccaccttccatgaaaaatcgccggggcagtgggcgcagcgggtcgaggagcgtacccgcccgccagcctcgaagccgatcagcttggacaccagcctcaaagagggccaggcgcttctggatgcaatacccgccacaatcaaacgtcttgagggccattccaataaaccctggcgcctgccgacagacatcgaagggatgtttcacctggaggtgtcgccccttgagcgcgcgattgaaaacatcgaggaggccctcacccaacgcaatctgactgaaatcgaccaccccgccgcggcccaactcaagctcaagctcaatgcagccgtgcagcagctttacgaagagggcaaagccacgcgcatcaggatgatcaaggagcaggttcccgtcgcatctcgtattcagtggctgtatgaacagggcgaggtgatcgtcaggaaaaccctcacgcgccgacgcctcaaaagccgtagagacttcctggacgaatacggagtccacgatcgcaagacccaggccgtattgtggtatgcgcactttcattaccactcgatgcaggcaggtagcgaagacttcgtcgccgggcacttcaagaccgttgcgcaacaaaaactcgggggtgcctttcagaccacagggctctcagacaaagagcagattgccattgagcgcgcagccattggcaaaccattggccaagtcgatgtttttcaacacgcacccccacagcgaaacctgagggctcgctcactgccataccctgcgcaagcgctccagcgcctggacaatcgctggctccggtacggcggcgaaccccaataccaggccggcacgctggtccgcaggcgggctggattgcgccagccaataactgctcaggccattgatttcaacctcagcggcccgcgccagttcgagcaactgctgctcgcgggccaggctgtccacgcgcaccgtcagatgcaaccctgcggcgacactgggcaactcgccgacaccggccaacccgcttggccaacccgccagcaaggtattgcgccggctcaacgcggcacggcgcatgcggcggatatggcgctggaaatgcccagcggccatgaattcagccatcaccgcctgggtgctgacctcggagtggcgcatgtcgacggcacggcgccgggcgaacgcatccaccaggcccgccggcaacaccagatagcccaggcgcaacgcagggaaggcgaccttgccgaaagtaccgacatagagcacgcgcccactgcgatccagcgcggccaggggcgacaacggtgcgccgctgtagcggtactcgccgtcgtagtcgtcctcgatgatccaaccgcccgtacgctcggcccaggcgagcaactccaggcgccgcgccaggctcatcaccacccccatcgggtactggtgggagggtgtgacataggccacgcggcaatcgctcaaggtattgagcacctgacaatcaatgccttcgccatccaccggcacgccgtgcaatttcccgcccgccagggcgaacgcatgcccggccgcacgatagccggggttttccaccgccacgccatcaccgggctccaccagcaactgtgcacaaaggctgatggcctgctgcgcgccactggtgatcactatttgttcagccgtgcaatgcatgcctcgtgagctgcgcaagtaggcggcaatcagaccacgcaggcggccgtcgcccgcggggtcgccgtagcacagcagttccaggtccggattgcgccagaatgccccgttcagcttcgcccagacctcgaacggaaacagatcgaaggcgggtacacccacacgaaatgcccgtggcggccccgctggcggcagagacaggtggttggtttttatccgcgccaagcccgcgctgtggataacttcactgtcgaggtcttccggcaaatccgcccattttgtggataaggttggggataagcctgttgaaaaccctgtggatacttttgtggatagtttttttgcgctgggtaattgggccacataggtgccatcgccgacccggctttcaataaacccctccgcatacagctgatcgtaggcgcgcaccacgctgttacgggaaatcgataacgccgccgccaggtcacgggtggccggcaaacgcgtcccactgaccaatcgcccgtccagcacgcgctggcgcagggcgtcatacagctggcgcgtcaggccttgacggcgatccagctcaattccggcagggttgaacgacaggggcggcgagacaggcgacatattggacctatgaaatgggtgccagatggctctttcaacgagccattagcctgcctaggatgcaggcattcgccaaggaatatttccatgtacacacctcgcgcctttgccctcgacgatttgcccgaactgcagcaactgatccagcacacccgcctggcgcaactggtgacctttggcgagcatggcctgcaagccagccacctgcccttgctgctcaaccccgatgaaggcccgaacggcacactctacgggcacctggccaaagccaatgcgcagtggaaagacctgcagaacggcagcgaagcgctggtgatcttcgcgggtgccgaggcctacatcagcccggcgttctacccggccaaggccgagcacggcaaagtcgtgcctacctggaactacatcgccgtgcacgcctatggcaaagccgaggtgttcaacgatgccgagcgcttgctcgcggtggtcactgcgctgaccgatcgccatgaaggcggccgcgaccagccctggaaagtcagcgacgcgccggccgactatatcgacggcatgctcaaggccatcgtcggcttcgccctgccgatcgagcgcttgatcggcaaacgcaaactcagccagaaccgcagtgcggccgacatgacaggcgtgcgtgcgggcctggcaaccagcgccgatgtgcgcgaccagaccctcgcccgttttattccccaaggagccccagaatgagcccgatcgacatccgccaagtcaccgccgccgaccacgctgcctggttgccgctgtggcaggcgtatttgaagttctacgaaaccgaactgccggacgccgtcagccaaagcacctggcaacgcctgatcgacgccagcgagccgacccattcggccctggcctggcaggacggcaaggcggtgggcatggtcaatttcatctaccatcgctccaattggagcatcgagaattcctgctacctgcaggacttgctggtggacccggcccaacgcggcaccggcgtcggtcgcaagctgatcgagttcgtctacgccaccgccaaggccgatggctgcgccaaggtgcactggctgacccacgagaccaatgccaccgcgatccaactctacgaacgcatcgccgaacgccctgggttcatccaatttcgcaaaggtctttaaggagcgcagcatgactacttccctcgccgactggaaaggcgtcccggccccaaccgtcaaactgcttgaagggcgcttcatccgcctggaaaaactcgacccggcccgccatggcgacgaattgttccaggccctccagggccccggtgccgaccccaagctgtgggactacttgccgtacggccctttcccggaacgcagcgccttcaatgactggctgaacaaccacgcggcccacagcgacccgtacttcttctgcgtggtcgaccgccagaccggccaggtgcaaggcctcctcagcctgatgtccatcgtccccgcacagggccgtatcgaaatcggccacgtcaccttcggcgcaccgatgcagcgctcgccgaaaagcaccgaggcggtgtacctgttggccaaacacgcgttcgaccagggctaccgccgcctggagtggaagtgcaacaacgccaacgatcgctccaggtacgcggccgagcggttgggcttcagtttcgaaggggtgttccgccagcacatggtggtgaagggcaagaaccgcgataccgcgtggtactcgatcctcgattcggagtggccgaaggttggagcggggtttgagaagtggttgtcgcaagagaatcagcgcggggatgggcaggtgaaaacattggcgcagtgccgtgcctgaatcgccaacactgcgttgatcaatgtgggagccgggctcccacattgggtcttcagtgccagcgccgttacctagaggtttctgcgcaccttcactacccccatcttcaatccgaatggccggaacactgcattcagcgatttcagtgtctgattgccttcgccatgctcgatatgcaccaaggtacgcacggagattttgcacatcctggcaaactggctttgatgcaggccggtgacttcggtgcgcaagcggcgtaccgcttcggcgatttccagtgtgccttctgccaaggcatcctgaatgctttcaatcaacagggtgcgttcttccacggtcaagctcatttcagtccccattctttcaaccgctgcggcagatgtttcaacgcaatgccgggatggttcattgtcactgcaggcaggccgctggcattgagtatgtctggcagggctgaaagctgttgcgcggcctccctcaggtcttcgaacagctgctcgctgtcgacaagatcacccagcaaatgacatacaccccgccaatccacgtcgcccgcccgctccagctccctgggccatttggtcgtgcgcgtgatgccttcgtcgtccattaccatcggcgccaaatcgtagatgggtgcaagacgcagggcgttcgcttcgcgaatgatcgaggtattgcgaccatggttgtccgagttgccgaggattttgttcaacagatcgcgcttgagatactcagcgaccaaccccggtacttgattggactgaccagcctctcgccacaattcaaccaacaacgtcaccacctcacgatgcgccatggcgctgcctggcaccgtgacacccgccaatgagtagattgactccacggcatagcgttcgaccccctgcgcagtgacgcgccgatcaaaacggtgcatccacacactgggcttgctcgcttcctccagtgataaccccgactccgccacggtatcaatacccaaggcctgcaaggctttgtagtagtggaattcgctacgcaggatgtcctgatccgtctgtgtgcctttgttgcgtgcaaacttcacaaaccaatgctgcttgacctgctcgtcgtccagcaccgcatccgggaataacaaaccgtccaggttttctgtcagcagtaactttggcgcctccccgcccgcccccgtggctccgccgatagctgcgccttgctcataggcatactccaggaaacggttatcccgccggataacctcatgacgttcaaaccccatgggggttcgattgtccaaagcctcaaccgattctttgattcgcatatgtccaatgggggcaggcgtactgcgcatcagcagaaaaaggtctgcactgatgtcatctggtttatccccaccaatacgcgccatcagaaaacgtttagcggcacccgcaggtgcgatgtcatgtacaaaagcgggagcatgctgggctctatcaccctcccattgcagtgggaacgcggcactcaccgaagtggcgaagggtgtcgccagttcatcaaggtgttccaccagatagcgctggtcataaccaaaactgcaccgactttcgaaacccagttgcggcgtatcaaatgtcaggagcatggcgtcctgccactttccttcagcgtagatttgtagtgtcagacagaccatggctctcacctgcaatttaatgcattcaccagctgaaaaggtgaactgaaattgcaatatagtgcagatacggagctcacgcacccactatgaacgcaataaaatgcagattcaaaaaacatcgagcaaaggaagatgagtttttaatcgccccgtactagagacaactcccgcaaaccaggggtcgatggcctgacagttatcaccccaccatctcgctaaattcccggcctcattcatcagaggttgggatttcatgccttttacaccgcacagagttgcccttgtcattgcccttgctctcagcgccgccagccttcaaaccgcacaggcgcggggcgatatcgaatacacgccgtactggtatcaaccctacgatgcacttgatgacgcgtgggtctacgtgcccgaaaccaaagcggcgcccctcgacggttatctcacccgcaaggccacttcgcacaatggcttgcaagtggccaaggtgctggagcccgcgctgattcgtttgctgcagtccggggagctgactgccgagcagatcaaagccctggagaaattcggtgatgcgctggagaaacagcctggcggaatcggtgccagccttgagcaattggctggcagccagaacgccaacctcgcgggcgcaacgcaaaacaccacgcagcaactcggcaaccaattgatttcaaccctgcgcacactgcccgccgacgacgaaggacacttctgggttcaaggcctgggccacgacggccgcctcgataaacaaggcggcagcgccggcttgaaatacagcaccgaaggcctgctgttgggcgccgactgggcactggatcacgcctggcgcgtaggtgtactgggcgcaaaatccaccagccatttcgacactccacgcttcgcctccgagttggacagttggcacctgggcggttatgccgtacgccgggacggcccgctggccctgcgcctgggcgcgatatacagcgaccatgcggggcagaacaaacgcaacgtcaacctgctggattacaaggagcacctcaggggccaatacaacgcccagagccaaaccctgttttccgagctgggctatcaactgggcagcacggatctcagcgtggaacccttcgccggcctcggcttccagcgctaccaccgcgacagcttcaaggaaaccggtggcctgaccgcactgaacgtagatgcacaaacccagcagaacttgagcagcatcgtgggccttcgcctggcaacggtgtatcgattcgataaccaggtcagcctcacacctcatctcagcaccggctggaaacacctctacggcgaggtcgaaagccaggtgcgccagtcctaccgcgcattgccagggcgggttgacggcttcacggtccagggcacttcgctggatcgcaatagcctggatctgcaagccgggctggacctggccctgtcgacacaacacaccgtcggcctgacctacagcgcccaggccggtaccaacagccgtaaccacggcctgatggggcaatggaagatgagcttctgacccaccaaactccaggcaaaaaaaaggggggcacctgcccccccgaggattaaacggtcgtgtcgaaggctgtatcagccttcgatctcaatcaggatttcgccagggttgacccggtcgcccttggccacatgaacggcggtgaccttgccggcaatcgcggcctgtacttcggtttccatcttcatggcttcggtaatcagcacggcctggccggccttgaccacgtcgccttccttgaccagcacatcgacgatattgcccggcatcgctgtgctgacatggcccggcgcggtagcgtgcttgcggttgctgctgccgccgctgacgaactcattgagcggttcgaacaccacttcttccggcatgccgtcgatggacaggtagaagtgacgcttgccctcggccttcacgccaacaccggtgatgtccacgcggtagctttcaccgtgcacgtcgatgacgaactcggtcggcacgccttcgccaccggcacgcgccacaccgccggcttcagggatcggcagcagcacttccggcgccagggtgccggcgtcgcgttcttcgaggaacttgcgcccgatgtccgggaacatcgcgtaggtcagcacgtcttcttcggacttggccaacgcgccgatttcaccgcgcagcttggtcatttccggcttgagcaggtcggccgggcgcacgtcgatcacttcttcgctgccgatggcctggcgccgcagtttctcgttcaccgtgcccggcgccttgccgtagccgccttgcaggtagagcttcacttcgttggtgatggtcttgtaacgctcgccggccagcacgttgaagaacgcctgggtgccgacgatctgcgaggtcggggtgaccagcggcgggaagccaaggtcttcacgtacgcgcgggatctcggccaacacttcgctcatgcggttgagggcgccctgctctttcaactggttggccaggttggaaatcatcccgcccggcacctggttgacttgcacacgggtgtcgaccgcggtgaattcgctttcgaactggtggtacttcttgcgcacggcatagaagtacaggccgatctcttgcagcagctccaggctcaggccggtgtcgaactcgctgcctttaagggcggcgaccatcgactcggtccctgggtggctggtgccccaggcgaagctggagatggcggtgtcgatatggtcagcaccgttctcgatggccttgagttggcacatcgcggccaaacctgcagtgtcatgcgagtggataaagatcggcagactctgctcggccttcagcgccttgaccagctcgccggtggcatacggggtcaacaggccggccatgtccttgatcgcgatggagtcgcaacccatcgattccagctgcttggcctgcgccacgaaggcttcaacggtgtgcaccgggctggtggtgtaggcgatggtgccttgggcatgcttgccggcggctttcaccgcttcgatggccacgcgcaggttacgcacgtcgttcatggcgtcgaaaatgcggaagacatcgatgccattcacagccgccttggccacgaacgccttcaccacatcgtcactgtagtgacggtagcccagcaggttctggccgcgcagcagcatttgcaggcgcgtgttgggcaatgcggcgcgcagtttgcgcaggcgctcccacgggtcttccttgaggaagcgtacgcaggcgtcgaaggtcgcgccgccccagacttccagggaccagtagccgactttgtcgagcttgtcgcagatcggcagcatgtcgtcggtgcgcatgcgggtcgccagcaacgattggtgggcgtcgcgcaggatggtgtcggtgacaaagattttcttggacattgttgtattcctcacaggcctgcgtgggcggcgatggcggcggcgatggccagggccagctcttcgggtttgcgcttgatcgagtagttggtcagctcagggtggctttccacgaagctggtgttgaactggccgctgcggaattccgggttgcgcaggatttcctggtagtaggcggcagtggtcttcacgccttgcaggcgcatgtcatccagggcgcgcaggccgcggtccatggcttcttcccaggtcaacgcccacaccaccagtttcaggcacatagagtcgtagaacggcgggatggtgtagccggtgtagatcgccgtgtccgtacgcacgccgggaccgccgggtgcgtagtaacgggtgatcttgccgaagctgggcaggaagttgtttttcgggtcttcggcgttgatacggaactgcaacgcgaaaccacggtgctggatgtcttcctgcttcaccgacagtggcaggccggaggcgatgcggatctgttcgcggacgatgtcgatcccggtgatttcttcggtgatggtgtgttccacctgcacccgggtattcatctccatgaagtacacctcgccctcggcgagcaggaactccacggtaccggcgttctcgtagcccacggccttggcggcgcgcaccgacaggtcgccgatataggcacgctgttccggagtcagttgcgggcttggagcgatttcgatgagcttctggttgcgacgctggatcgagcaatcgcgctcgaacaggtgcaccacgttgccgaagctgtcaccgaggatctgcgcctcaatgtgcttgggattgacgatgcatttttccaggaacacttccgccgagccgaaggccttggtggcctcggaaatcacgcgggggaaggcttgttcgagttcttcgcggctgttgcaacgacggataccacgaccaccaccaccggacgtggccttgagcatcaccgggtaaccaatgcggtcgccctcggtgagtgcctcgtggatatccgcgacgttgccttcggtgcccggcgtgaccggcacaccggccttgatcatgctgcggcgcgcttcggtcttgtcgcccatgcggcgaatcacttcggccgatgggccaatgaatttgatgccgcgttcggcgcagatgtccgccagttcagcgttttccgacaggaagccatagccggggtgcagcgcatcgcagccggtttccaccgctaggttcaccagcttgcgcgggttcaggtaaccggccaggggctcggcaccgatgctgtgggcttcgtcggcacgcttgacgtgcaacgcgtggcggtcggcgtcggagtagaccgcgaccgagcgaatgcccatctcggcgcaggcacgcacgattcgtacggcaatttcaccacggttggcgatcaggatcttttttatcacttggaaattcccttgagccgattgctgcgttcttcgacccactggagccgggtcggcgcgtgaccaaatgtttcatgacagtcgcgagacacacactaagcccgccaagggattaacaaaaatcaataattattgggtcgggcataagtaaagacttatagttgtccgaacagccggtggcgagagaattagaaaatgcgtaagtcattgatgcgactgacattgcgtcaattgcagatcttccatgaggtgtgcgatttgcgctcctacagccgtgcggccgaggaaatgtccctcacgcaaccagccgtcagcctgcaaatccgtcaactggaagagctgatcggccagccgctgttcgattacgtgggcaaaaagctctacatgaccgaggctgccgaagccctgcagcgcgccagtcgcgacatcttcgggcgcctggaaaacctcgatatgcagctttcggacatgcagggttcgttgcagggccagctgaaactggcgattgaatccagcgccaagtacttcgtgccgcacctgttcgccgccttcaagcgtcagcatccggaagtgcagttgcaattgacggtggtgaaccgcgcccaggtgattcgccggctttcggacaaccgcgacgacctggtgatcatgtccatggtgccccaggacatgggcctggaattcctgcccttcctcaacaacccgattgtcgctgtggcgcctcccgaccatcccttgagcctgcaaggcccgctgcgcctgcaggacctggagccctacacgctgttgctgcgcgaaccaggttccggcacgcgactggcctgcgaggagtacttcaaggaaaaacgcgtgcacttcacccagacggtggaagtggcctcggccgaggcgcagcgtgagtgtgtctgtgcgggattgggcgtagccctgctgacgcgtcatgcggtcaacatggagttggccaccggcgggctcaaggagctgccggtggaagagctgccgctgtaccgcagttggtgcctggtgcaggccaaggccaagcgcctgtcaccggtggcccatgcgttcctgggctttatccgcagcgaacgagcgcagatcagcgtgctggctgagcgtttcgctgggcagccgcgggtgcctgccagtggagttccgggtagtcactgatgctctggagcaactggcgctcctcacaacggtcttcgattgcgcgacggaacgccatgcggcgttggtcttcctgctgacgacgggttttgacggagctgttgctgtcttcgtaagtccgggccatttggagtctcccaatgcgagtacggggagttcaggatggccttggggagttacggtttggcggcacacgcatgacaagacgatgaacattcctgatctgtaggaaatccaaatgtgggagggggcttgcccccgatagcagtgggtcagccaatgcatttggtgactgatacaccgtaatcgggggcaagccccctcccacattttgacctcaggtcaatcgtcgagggctttgacggatttcggtgacaggcgaaggctgcgcagactgcgcttcacgctcttgaggtggttgaccaggctcggcccacgcgccatggccacgcccatcgccagcacgtcgatcaccaccaggtgggcgatgcgcgaagtcagcggcgtgtagatttcggtgtcttcgtgcacgtcgatcgccaggttgaccgtagacagttccgccaacggcgtctggcttgggcacagggtgatcagcgatgcaccactttcacgcaccaggttggcggtgatcagcaggtctttggagcggcccgactgggaaatgcagatggccacgtccgtaggcttcaaggtcaccgccgacatggcttgcatgtgcgggtcgctgtaggccgcggcggtgagcagcaaacggaagaatttgtgctgggcatcagctgccaccgcgcccgaagcaccaaagccatagaactccacgcgctgagcctgggacatggccgtcacggccttttgcaactccaccgggtcgagcttctcgcgcacttccatgagggtgtgcaaggtggtgtcgaagattttcaggctgtagtcggcgacagagtcgtcttcatggatcgcaaattggccgaagctggcgccagcggccaggctttgcgccagcttgagtttcaagtcctggaacccggagcaaccaatagcgcggcagaagcgcacgatggtcggttcgctgatgcccacgctatgggccaggtcggccatggaactgtgcatcacagccgcagggtcaagcagcacgtgatcggcaaccttgagctccgatttgcgtaacaggtggcgcgactgggcgatatgttgcaacaggttcaaagggcaggactcttgttatgggcagggccagggatgtagcaagcttgtagttatactacaagaattgccgttttgcccgtccgacgcatcactaaatcgccctgcccccctttgaatctaagggcagccgcgttgtagccacaggggcgtccccagcgtcgttaaggaaattctgcatttttccgtaacaaatctgccaacccatcagcctgcatcggccgactgatcaaatagccctgcacttcgtcacaacgctcgccccgcaggaaatccagctgctgctgatcttccacaccctccgccaccaccttcagcgccagcccgtgggccatggcgatgattgcccgagtgatggccgcgtcttcgcgcccctgacccaggccgcggatgaaggtctggtcgatcttcacgtagtccacgggaatgcgcttgaggtagctgagggacgaataaccggtgccgaaatcgtcaatcgccagcttcacccccaggtctcgcagttgctggaaggtcgcgatgatgtgttcgacgctgtcgagcaattggctttcggtcagctccagctccaggtattgcgggtccaggccggtttcttcgagcacctggcgtaccaggctgaccaacttgccctggcgcagttggtgtaccgagaggttcaccgatacccggatcggcgccaacccctggcgctgccactcgcaggcttgccagcaggcctcgcgcagcacgaattcacccagcggcacgatcaggccggtctcttcggccaggccgatgaaatcccccggcggcaccatgccccactgcgggtgctcccaacggatcagcgcctcggccgcattcagcttgccgctggccaggcacagcttcggttggtagaacaccgtgagctgacgctcttcgatggccttgcgcaggtggttttccagctgcaagcgctccagggtgctggcttgcaggctgtcggtgtaaaactggaagttattgccgcccaagtgtttggcgtgctgcatggccatgttcgattggctgaccaacgcggaaatttcccgcgcgttgtccggcaacaggctgacgcccatggaggcactcaccaccaactcgtgcccctccaccgtcaccggcacccgcagtttggccagcagccgcgtagcgacccgcgccaggctcgacaggttgccgtaggcgtcgaacaacacagcaaactcatcccccgacagccgtgcaatggtgtcggcctcgggcaaggcgttgattaagcgtcgcgccattttctgcaacaactggtcggcgacttcatggcccaggctgtcgttgagcagtttgaagcggtccaggttgatgtgcagcaacgccaggctgcgcccaccctggcgtacgcgctggtgagcttcgcgcaaccgttcgcggaacagcgagcggttggccaggccggtcagttcgtcgtagtgagtgaggtagcgcatacgctcttcggactcacgccgtgctgaaagatcggcgaagaagcccacgatatggctgacttttcctcgaatatcacgcacgacattcaattgcagccactgcggatacagctcgccgtttttgcgtgtctccaccaattcgccctgccacgtgccgtggctgagcaacgcctggcggatcaccgggaaatggcggcgggcgtcacggctgctgggcagttccaccacgttgcggccaatcatgtcgtcggtttcaaaccccgtgacacggctgaaggcttggttgacggcaatcagcttgtagtccggatcaaggatcacaatgccttcgctggcggcttcaaatacggtcgaggccaaccgctgctgttcctccagggccttgccggcgctgatatcgcggcgcgtccccagcatgcgcgtgacccggccgctgggcgcacgctccacggcgcggccacggtcttcgatccacacccagtgcccgtcgccatggcgcacgcggtattccacctggtagtcctcgctgcggcccttgaggtgttccaccagggcacgcttgagcagcggcaggtcttcggggtgcaggcgcggcttgaggtggctgagcattgccgttacgtactccggctccaggccgaacagctccttgagctgggtgtgatggacctcgtcggtttgcaggttccagtcccacaggcccagttcactggcttgcagggccatggccaggcgcgcttcgcttttattcagggccaggctggcggcgtccagttcctggctgcgctgtgccacacggtcttgcaggccggtctgggcttcgcgcagttcctgttcgacttggcgacgctgctcgacttcgcgcaccagttcctgattgagttgctcgctgcgctgctgcgcctgttgcaggtgctcgatcagcgcctggttctggaagcggcgcaacaacccgcgctgaatcaggcgattgacctgccacgccaccaggctcaaggacgccagcaggatcaggccaagtacaccccagccgcgctgctgcgggtcgccactccagaacaggtagaggatggacggcaccaggcacggcaaggcaaaggacaggaacgccggcaggctcacggcgtatgccacgctggccgacaaggtcgccgcgccgatcaggccgaacacccaggcctgttgcatgaagctgtccaccggcaccagggcgatggcggcggtggccagcgtcaggccgctgaccgccgagccgagcaggaacatgcgttgccacaccggttgggcctggcggctgggcatcgccgagtcaaacgcggccacctgaatcacacgcatcgccaccagggccagcagccagaccaaccagacgctgtccaacaggtattgctgggggttccacagtagccaggcgcagaccaggccattgaccaacatcaacagggtcggcagcagcgagccttgatacagcaggcgtgtgcgctcgaccgccatctccgtggcgtagtgtttacggataacctgcgcgggagccgccgaggggccaagcaggtcggtgctaagggtcataggcagtgttcttataatggtgagcccgaaacgtcgacggagcatacacaagcaagcgcttgggccaaactgctccatgtcataaaaccgcacgctcatgccgcgcaaacttccgggccagacggcttgagtgagacgcggcgcgggctgtggccattgaccgaccggtcatcaccccgcaggtttgcctcgaccacccggcattgttatttgccccactcccccgggggccatagaatacgccgatgcgcgatgatctctcccttttgctgaactccctcaacgatgcccaacgccaggccgtagcggcccccgttggccgtcagttggtcctggccggtgctggctccggtaaaacccgagtgctggtgcaccgtatcgcctggttgatccaggtcgaaaacgcgtccccgcattccatcctgtcggtgaccttcaccaacaaggccgctgccgagatgcgccaccgcatcgaacagctgatgggcatcagcccggccggcatgtgggtaggcactttccacggcctggcgcaccgcttgctgcgggcgcattggcaggaagcgggcctggcccagaccttccagatcctcgacagcgatgaccagcaacgcctggtcaagcgggtgatccgcgagctgggcctcgacgaacaacgctggcccgcacgccaggcgcaatggtttatcaacggccagaaagacgaaggcctgcgcccgcaacatatccaggccagcggcgatctgttcctggccaccatgcgcagcatctatgaggcctacgaggccgcctgcgtgcgcgccggggtcatcgacttctccgaactgctgctgcgcgccctcgacctgtggcgcgataacccaggcttgctggcgcattaccagaaacgtttccgccacatcctggtggacgagttccaggacaccaacgccgtgcagtacgcctggctgcgcctgctggccaaaggtggcgacagcctgatggtggtgggcgacgacgaccagtcgatctacggctggcgtggcgcgaaaatcgagaacatctaccagtattccgaagacttcccggacgcggtcaccatccgcctggagcagaactatcgctccactgccgggatcctcaaggcggccaacgccttgattgccaacaacaccgggcgcctgggcaaagaactgtggaccgacggcggcgaaggcgaagcgatcaacctgtacgccgcgttcaacgaacacgatgaagcgcgctacgtggtggaaaccatcgaaagtgcgctgaaaaccggcctggcgcgcagcgacatcgcgatcctgtaccgctccaacgcccaatcgcgggtcctggaagaagccttgctgcgcgaacgtatcccgtaccgcatctatggcggccagcgcttcttcgagcgggccgagatcaagaacgccatggcttacctgcgcttgctggaaggccgtggcaacgatgcggcgctggaacgggtgatcaatatcccggcccgtggcatcggcgaaaaaaccgtcgaagccattcgtgaccacgcacgccacgccgatgtgtcgatgtgggaagccatgcgcctgctcatcgccaataaaggcctgaccggtcgtgcggcgggtgcgctgggtgtgtttgtcgagctgatcgagaacctggcggccaagtgcgcggaaatgcccctgcatttgatgacccagaccgtcatcgagcagtccgggctgatcgcctaccacgaagcggaaaaaggcgagaaaggccaggcccgggtagaaaaccttgaggaactggtcagcgccgcccgtgcgttcgaaaacaccgaggaagacgaagagctgaccccgctggccgcattcctcggccacgcgtcgctggaagccggtgatacccaggccgacgagcatgaagacagcgtccagctgatgaccttgcacagcgccaagggcctcgaattcccgtatgtgttcctggtgggcatggaagaaggcctgttcccgcacaagatgagcctggaagagcccggccgccttgaggaagaacgtcgcctggcctacgtgggcatcacccgggcgatgcagaacctggtgatgacctacgccgagacccgacgcctgtacggcagcgagacctacaacaaggtgtcgcgcttcgtacgtgaagtaccgaaggggctgatccaggaagtgcgcctgtccaacagcgtcagccgcccgttcggtggtggacagcagcagaactccagcagcatgttcgccggctccgagattccggaaacccagttcagccttggccaacaggtcaggcattcggtattcggcgaaggggtgatcctcaatttcgaaggcgcgggtgcccaggcgcgcgtgcaggtgaatttcgccgaaggcagcaagtggctgatgatgggttacgcgaagctcgaagccatttgaaacatttgcccacatgaaggtttttggcccgcccttgtttttaacgagcgcgggccaatatctgtaataagtcctacagaccactctgaatcggtcctacgcaaaagcccgaaacattatgccgctagccactgtcaccacacctgtgcaacatggcgcgcgtgcaatccacaaatgggaattccctttatgaaacgttttcttagcatcgccatggcgttgtgcatcggcctgacgatgagcctcgacgccaacgccaaacgcttcggtggcggcaaaagctcaggcgcagcaccgactcaccagactagccaaatggctccatccgccggtgccggcggtgctgcggccaccgcaggcgccgccggtgctgcaggcgctgcagccaaggccggcggtgcttcgcgctggttgggccctcttgccggcatcgccgccggtggcctgctcgcctccatgttcatgggcggcggcttccagggcatgcagatcttcgacatcctgatcatggcggtcatcgccttcctggtcttccgctttatcgccgcccgtcgccgcaagcagcaggagcacatggctccagccggcgcgccgatgcagcgtgaagtgttcgagcaaaaaccagccatgggctcgatcttcggtggttcgccagcgccagctgcggcccgtccggtgatcaacgcaccggcctggttcaacgaagaacgtttcgtcgaagcggcccgcagccacttccagtccctgcaacagcactgggacgccaacgaaatggacaagatcgccgagttcgtgaccccgcaactgctggagttcctcaagcgcgaacgcgccgagattggcgatgcattccagtcgacttacatcgacgacctgcgcgtgcaactggacggtgtggatgatcgcgccgacaagaccatcgccaccctgaccttcagcggtgtgtcgaagtcctcgcgtttcgaccagggcgaagtgttcagcgaaagctggaacatggaacgtgcccagggcgataaccagccatggctggtcgccggtatccgccagaacggctgatccctgcacgcttggtaaacagatacaaaaaaccccggacctgtccggggttttctatttcacggttgcacttatagcgagctactgtataaaacgcccctataaaccgcgccatctagcaagaggatcccggccgtggaagaaatcatcgaacaattgcgtgaagccaacgaaccggtcccggttcccttggagctgcctgacgaagaccaactggtggagatcgaggaacaactgttcatcgacatcccgtttgtcttccgtgaattcctgctgaccgtcagcgacgtggtgtacggcagcctcgagccggtgaccgtcaccgacccgcagtcccacacctacctgccggacgtggccgccaacgcctgggacgccggtgtcgaccgcagcctgatcccgatctgccaggacggcgacgactactactgcgtcgaagaagacggcaccgtggtgctgtggtccggcgaagaagaaatcgtcaccgaagaaacctgggaatcggtgtggcactgggcgcgagacgtctggctggaaagctgacagcgctctctggctaaagaggcttgctgtggcgagcgggcttgccccgcgtcgggctgcgaagcagcccccccaaaaaagtccctcaatgctccggcgtatccttatggttatccagcgtctccaacaaggcgacctgcatccgcgtatgcacgcggatgaaccatcgccagagcaccgccgccacagccgccgtgaccacggcgatcagcaccagcaacttgttggtcggcagaatactggccgacaaggctgccaatagcaggaagatcaccagcagcgagaggatcgggatcagctccgcgatcacccttcgcacacgctgggtatgccgcccggccatttccggcttcacgctcatctccgccagcagcatcgacagcgccttgagcttgcggtatgccgcaatcaagaacggcagcgacaacagcaacgccccgccccagatcaacgccttctgccagctcggatcgctgatccagccttccagatacccaccgatgcgcgccgcgaaaaagccgccggcaaagaagatcgcaatcaccagtgccaggttaacgcccacttgcaggatgatcttgcggatcatcgacgccagcatcgccccctcgccctggggttgaatgctgcgcagccattcgccatacatgccgaatactcggctcatacgctggggcatgaccgacgcgatcttcaacgacagcgggtcggcaccgcgaatcaggtacggcgtgagcagtgtggtgatggccgaaaccgctaccgccaccgggtagaggaaatcactggtcacctgcagcgtcatccccagcgccgcgatgatgaacgaaaactcgccaatctgtgacagccccatgcccacgcgcagtgaggtgcggccgtcattgccggcgataaacgcccccaggccgcaggacagcatcttgcccagcaccacggccacggtgatcaccgcaatcggccaggcgtattgcagtaggatctgcgggtcgatcatcaagccgatggcgacaaagaagatagcactgaacatgtcgcgaactggctcgatcaggcgctcgatcttaatcaactgccgagattcggccatgattgcgccgatcaggaacgcgcccagcaccatgctgtattccagtttgaccaccagcaggcagaaaccgaaacacaaccccagtacggtgatcagcaacatctcgttgctttcgaatttggccacgtaggccagcaaacgcggtaccagcaaaatgccgatgaccagcgcgacaatcatgaacagcgagagcttgccgactgtggagaacacttcgccggagctgaccgtaccgctgacggcaatgctcgacagcaaggcgatgatgccaatgccgaggatgtcctcgacgatcagcacgccaaaaatcagttgagcgaaacgctggttcttcatcttcaggtcattgagcgccttgacgatgatggtggtcgaggaaatcgccaggatcgcgccgaggaacagtgaatccatggtattccagtcgaaccagcggccgatttcgtagccgatccagatcatcaggatgatttccaggaaggccgcgataaacgcggtggcgccgaccttgaacagtttgcgcaggctgaattccaggcccaggcagaacatcaggaagatcacccccagctccgcgagggtcttgatagtgtcttcgtcgtggatcagaccgaacggcggggtgtgggggccgatgatgaacccggcgacgatgtagcccagcaccaccggctgcttgaggcggtgaaacaggatggtgacaacccctgccaccagcatgatcacggccaagtcctggataaagctgatggcgtgcatggcgaggggctccttgagggtactggcgcttttcccacttccgcgcgcgcctttgaaatgtcgcaaagtgcggaaggaaaagtctgccttgatcgtaagaaatgccctgagatgggcttttgaaggttaacaccgcgacttccgccggaaagccggtgcaatatatggaaacagatcggtgcgcgcgtgacggcaagccccccaccggcgtcccgttatggatggttctgcaaagattccagcacccgcagaggtgccccccaaccaatgcctacaacccgtgagtgtgctatggaacccggaaacgcccagctgtcgatgacggtattgatgacccctgacatggccaacttctcaggcaatgtccacggcggcaccctgctcaagtacctcgacgaagtggcctacgcctgcgcgagccgttatgccggccgctatgtggtcacgctgtcggtggaccaggtgatcttccgcgagccgatccatgtcggcgagctagtgaccttcctcgcgtccgtcaactacaccggcaacacctcgatggaggtgggcatcaaggtggtgaccgagaatatccgcgaacgctcggtgcgccataccaacagctgcttcttcaccatggtggccgtggacgaccagcgtaaaccggccgccgtgcccccgctgcaaccacagaacagcgaagacaagcgccggttcgtgcaggcccagcagcgccggcagatccgtcaggaactggaaaagcgctaccaggaaatcaaggcagacgcgctgtaggccctttccccgttgtaggagcgaacaaccgcgctcctacaatcgccagcactgatcatcgtgggcacagacatcaaagcgctggtccaactggctcatgcgctccatatgatggttcacgatgtccaccatcaccgctttgctggtgtttttgtagtactgcgccatcaacttgtcgttcgccttgacgcgctcgaccacggcggcgtccgtcgggttctgccattgctccaggatggcatcttcggtgccgctcaggcgcatgcggtaaacccgctcataaagcgccagggtacgcgccttgcggccggccatttcctgattcaccagtgcatagttctgacggtactgaacccaatagtcgtcaggtggcgtgaatgagccgaatcgcgccttgcgctcggcgattgactcttcgacggcttgcggacgctgcgcggtgtcaggctccatcaacgtgatgagttgcatatgggtttcaacgatcgcgttgatcaacgcggtacggtgtggcgtatccgggatcaccttgccgaatatcgggcttttgcccgcgcacgatggcatgccgttctcgaatatcggctgtggaatgcgtacatccttgccacccgagcgcgtcaggcgctgcaacgaggtcgtgcagatgccacgcgccatatcgaaggtcacttcgtactcttccccggcctttggcgtgatgctcattgatttgccgcagacatagctgccgccattggtgttgatcatcaacatggtttctttgccgggtgccagcttgaactccagcaagcctctggccgtggccggcgggggcaccgacatgccgacacgccgccgggtatcgaccaggaaaatattgttgagcatgccggtggtctggcccatgcaatgctgcgtatcgtagacgtcgatggtggtattggaggtattggagatgaagcgcagcttggcagcgtccggatcggtggcgtcagggtaagtaccgttcacactgcaaccggccagcaacgatgtcagcaccagggcggtcagtgcccgtggcgaagggaatacgggggacatggttcttccttgaaaagcacaggggactaagaggcgcccgatagtaccggacgccctttgcctggctcaatcaggaatattcctacaacccgataggcgtggcttcgaaacgcacgcgaggatgggcaatgcggtcctgggcgcgcaccagctccagttcgtaactggcgcaggcctgggtttccaacagcacttcatggaccgctgcggcggtgaattcgaaggcggcgagcaggctgtcgcccaacagaacacgcgccagaaacagccccgaggtcaaatcgccgacgcccaccggctgacgggggaacgccagcagcggccggcgcaaatgccagctaccatcggcggtcaccagtagcatctcgaaaccgtccggcaacttgcctggataatccaggtgtttgaccaatacggccttcggcccacgcgccagcaacgccttggccatggccaggcaatcgaacagcgattgcggcttgcgcccggcaaagctgtccaactccaactggttggggcacaggaagtcggccatggccgcggcttcgtccagcaggaaatcgctgacttcctggggcacgatgcagcccttttcaggatgccccatcaccgggtcgcacaggtacagggccttggggttgatggccttgatgcgcgcaacgccggtcagaatcgcccggccctgatcggcactgcccaggtagccggacagaatcgcatcgcaattgcccagctcgccgatggcggcaatgccttccaccaacgcgggaatctgctgtggcgccaacacttctcccgcccattggccatactgggtgtggttggagaactgcaccgtgttcagcggccacacgttcacccccacgcgctgcatggggaacacggcggcgctgtttccggcgtggccaaagaccacatgagactggatcgcaagcagatgaggtgtgcgtttcatgcgggagatttccgtaaaaccaatgaaattctggccgcgcagtatgcgactaaacgcagcctgtacgacagaccggcgacacagttaagctgctctcactttgttggagtttttcgcatgctgaccctgggaaacatgttcgtgttgatgctgctggcgaccggtgccgcctgggtatggcacaaccacggcctgcgcgagcgggcgctggagcgggtcaagcagcattgcgccaagctcgacatcgaactgctcgacggtgcggtggcactcaagcgcatcggctttgtaaaggatgccaacggtcggcgacgcctggcgcgcatctacaacttcgagttcaccgtgaccggcgaaacccgccacccggggactatcacccagttcggtgcccacagcgcacagatcgaactggcgccctacccgttcgagatcaagacgccgctgcccagcgccgaagtgattgagctgagccagtggcgccaggaccatgcgtccaagaaccgtcactgacgactggcggccagcgcacgctgtaacacatccacgtcctgtggctcgctgaagatcaattcgatacgcgaatcgcggcgccattcgctgggttgccagctgagcgggccgttatccacagcgttggcggacacccagccttcggcactgtggataaccagcttggcgcggcgccaatcaaggcttgtaagccagttatgcagctgctgggtgtcgaactgctggctggggtgccagcgccagccaatgctccaaccgccctcttgagcctgactcaggcaaatgggttggtcaggatcggtccagatagccggcatttgccccaggcctgtgggcacggcgaagttatccacagccgcaacagcccgtgcgtcaaggccgggtaaatgcgctagcggtagatgcgcctggcgagtccagtaaagcgggcattctggtaactgccgctcgatcacctcgcgctgcgctgcattcagtgcttcgtctttgttcaataccagcaacccggcactcgccaacgcttcctgctgcgctgggggcaagggtttgcccgccgccagcgcttgcgcatccagcaccagcacgcacggctggacggccagcacgttgtgccacggcgcttcgcgcaactgcttgagcaactgcgccggatgacccaggcccgagggttcgataaacaaccgatcaggcttggccttacccaacaagcgacccaagcctacttggaacggagcgccattcacacaacacaggcaacctcccgcaacttcgcccaaggcaatgccgtcgtcatcttgcgtgagcaaggcagcgtccaggccgatctgcccgaactcgttgatcaacacagcccaacgctcattggctgggcgttgggcgagcaggtgctggatgaggctggtcttgccggcgcccaagggcccggcaatcacgtgggtgggaatgttctgcagcatgagaggcatcgttcggaccgtgtagagcgtttgatcctacgcggttatgcgagccaatccagtgtcaggatcaagcggcgctcgtcggccttcagtgcgggcgaacggtgaatcaggccatggccttcattgccatgccatttggtgcccttgagcaaggccacttcgccgcagtggatctgctcgatacgctcggtgggttcggcatccggctggctgagtttgcgacggtccatcacgccttcacgcaaccactggctgccaaccccggcataggtggtgatcaggcgcaccggcacgtggtcgacgtgaaaacgcgggcacatggctttatccaacagacgcaggcgcacgccgatccgcttggcgccgagcaggcaggcgaacgcactgaccagccacgacacatcggcgataaagccttcgtagccctcaagatcacgacaactggacgccaaaccctgcaagttgggctcggcatcttcattgttgagctcgatgaccatggagtcggccaacggctcgttgagcgacaccaacaacgcgccgaactcggcgatgtgcagcggcaactgacgctgccacagcgccaggttgacgccgtcttcgaggatgtcggacagcgccagcggggtgtcaccacgggtctggcgaatcacgggacgcagggggataaccggggccagcatcaggcggctgcctcctcataccaggggccaaaagggtcggccagcaggcgccagccttcgacgcccagggccatttcttcatcggtgagcaagcacgcatccaactcggcgcgcattcgggtgaagtcgatgttctggccgataaacaccagctcctggcggcagtcgccagtgctcagttgccagttgcccatgatcgccgcgatgctctcttcgtcctgaggccattggcttttgggcacaaagcgccaccagcggccggcaaacccatgacgcatcagaccgccggcctgggaccaactgcccgcatcctggtgtttgctggccagccagaaaaaccccttggagcgcagcagtttgccgttgacccaggggcggtcgataaagtcgaaaaagcgctgcggatgaaacgggcggcgcgcgcggtaagcggtggaggcgatgccgtattcctcggtttccggcacatgttcaccgcgcaattcctgcagccagcccggcgcctgggcggcgcgctcgaagtcgaaacggccggtgttgaggatcttgttcagcggcacttcgcccatgaccatcgggatgatttccgcctgggcgttgaggcgctcgaggattgccatcaactcttcacgttcgcggctgctgatcaggtcgatcttgctgataaggatcacgtcggcgaattcgatctgctcgatcagcaggtcggtgatggagcgctcgtcttcttcaccgagggtttcaccgcgcgaggccaggctttcggcggcctggtagtcgagcaggaagttcatgccgtcgaccacggtgaccatggtgtccagacgggcgatgtcggccaggctttgctcgttctcgtcacgaaaggtgaaggtctcggccaccggcaagggctcggagatgccggtggattcgatcagcaggtaatcgaagcgaccttccttggcgagttttccgacttcttccagcaagtcttcacgcaaggtgcagcagatgcagccgttgctcatctccaccagtttttcttcggcacggttgagggtgacgtcgcgctggacttcgctgccatcgatgttgatttcgctcatatcgttgacgatcaccgccacccgcagattttcgcggttgcgcaggacatagttaagcagcgtgcttttaccggcgccgagaaagccggacaacacagtaacggggaggcgattgggcatcaggtattcctcatcagggttggccggtcaaatcgcccgtttatggcgttcgcgcagctcttcacgttctttggcttcgatacacagggtggcggtaggacgcagcaacaagcgcttcaggccgatgggctcgccagtctcgcggcaccagccgtactcgccgcgcgccagcaattcgagggcgtcgtcgatcttgtccagcagcttcttttcccgctccagcaggcgcagttgccattgacgctgttcttcagcgctaccgacatcggccgggtcgctgttggtttcctgctcgcgcagcagcaggaattgggcgtcgatacgcgcttgcagctctttgcgttgggccagcagcaactcacggaagaagccttgttgggcctcattcatgtagtcgtcgggcagctgggccagcaggtcttgttcggtcatggagagcggttcacgggtcaggctgtgcttttatgttatagtataacaatacaaataagccaataccctcttgctcaccacgacgaagggcgcaatgcttgaacacttccctgccgcgagaaacctgatgaaatacctggtgtgcgccctgtttttggctgcggcgggacctgcctgcgcccaggcccccagcctgttggcccactgcacgcgcagcgccaacctgctggcttgtgtggatccattgggcaatgcctacagcgtggcgaccgtcggcagtaccacgtatttgcgcgggtatgaggtgatcggcaagcgctactgggcgcagaccaacagccgctacgggcagctgacgttctttaccgggttggcgtcggatggtgaggcgtgggtcggctacacgcggcgcgtgggctggaccaccctcaaccggttttccagttcgggtggcgccagcgccaaattcacctgcagccgtataacgggttgctagacctgggcgttcttctgttcctgcacccacgccatgtagctgttcatcggtgggttcttctggaaatactttttcaagccttcgaacaacccatcggcaactgcctgttgatgccgcgcggtgaccagccgcgcgctgtcccgcgcattggaaataaacccggtttccaccaaaatcgatggcacgtcgggtgacttgagcaccgcgaatcccgcctgttccacgcgtttctgatgcaggctggtgatgccttccaggctgcccaggatcgaattgcccagttgcaggctggaggcgatggtggcgttcatcgacatgtccaggatcaccccggcgagcatcgggtccttgtccttcagattcagcaggctggtggcgccaagcaaatcggcaccgttttcccgctgcgccatgaacctcgccgtggcggacgtcgcgccgccttcggacaaggcatacaccgacgcgcccgaggcagtaatgcgcggtgccgcgtccgcatgcacggagataaacatgtcggcattgtgcttgtgagcgatctccacccgtttgcgcagcggtacgaagaagtcatcgttgcgcaccaacttcacatcaaagcccttctcgcgcttcaagcgtttggccaacagttgcgcgatggacagcaccacgtctttttcgcgctggcccttggacccgaccgcgcccgggtccttgccgccgtggccggggtccaccaccacaatgatgtcgcgcttggggtgcgccttatccacgcgcggcgcaggttcggcggcaatctggcgaggcgcctgggtggcgttggtcaggtccagcaccaggcgatgaccctggccgtcctggggcggcaatagaaagctgttgagctgcatcggtgcgaccaggtccagcacgatgcgcgtatcgcctttaccaaaatgcccagagcgaatcgaggtgatgccgctgttcttcaacgccaactgagagaaatcaccgctgaggccggcgccgctgaggtcgatgatcaggcgttccggcgcgctcagggtgaaggtcttgtattgcaccgggccgctgagatcgaacaccaaccgcagcttgtcgtccgaacgccacaggcgggcgttgctgatctgcgtggcgtgggccgcgaatggcaaggtgaaaagagggctggccagaagcaggttaagaagctgacgtctgtgcatgaaaagtaccgcaaaaaaggagcgtccctgctcgacatgactgaaaaaaggctggcgcagaaaaaccatcgtcgacacaatagttatactataacatgtctttttatttccaatgatggacctgctcatgaatgcgctgactctgccggatatcgccgcgcaggcttcacgccaagccttgccactcgactgggtaggcatgtgcggcatcgccctgccaatcctcatcgacggccagcgcctcaccgccagcgccgatgcgggcgtgagcctggacgatggcgccgcccgtggcattcatatgtcacgcctgtatctggcgctggagatgctcgaccagcagccgcttacgcctgcacttctgcgtaatgtactgcagcgttttctcgacagtcatgaaggtttatctaataacgcctacctgcgcatccacactgatctgctgctcaagcgctcggcgctggtcagcccgttggccggctggaaaggctacccggtgagcatcgaagcgcgcctggaaaaacagatgttccacgtggaactaaaaattgacgttacctattcctcaacctgcccgtgctcggctgccctcgccaggcagttgattcagcagcaatttcttgaagactttggcaacaccccgctgcagcatgaggacgtgttgacctggctcggcagcgccaacggcatcgtcgccacgccccacagccagcgcagcaccgcgcagttgctgatcgaactggatggcgaccaacccagcctgcccatcaccgaactgatcgataacgtcgaagccgccctcggcactgccgtacaaaccgctgtaaaacgcgcggacgaacaagccttcgcactggccaatgggcagaacctgatgttctgcgaagacgccgcccgccgcctgaacctcgccttgaaacgctcggatgccgtcaaagccttccacctcaaagtgatccacgccgaaagcctgcacgcgcacgatgccgtggctgaaagccgctggacgagaaaccctgcatgatcacctgcaccgccttacgctggggcgccccgggccaaccactgacgcccggcgtcgacctcacccttgagaaaggcagcctcaccggcatcatcggcgccaacggcaccggcaaaagcagcctgctcaaagtcatcgccggcctgcaaaaacccttggcgggcaaggtcacggtggcggttccacgccgtggcggtctgtcgtttctgccccagcaacagcacctggaccgccagttccccatcagcctgcaggaactgatcgccgccggattctggggcacccagctctccccgcaacaacgcagccagcgccttgaagccgtgttggaggactggtgcctcagcggcctggaacaccgcccgttgatggcattgtccggtggtgagctgcaacgcgcgctgctcgcccgcatgagcctggccgaagcgccggtgctgctgctcgatgagccccacgcagccctcgatgaagaaggccaggcgctgtgctggaaacacatccacgcctggcacgacgcaggccgtacgctgatcgtggtctgccatgacctcgcttccgtgcgccaccacacccagcaggtggtgcagatcaaaaacaccggctgcctgttcggccccagcaaagagctgatccgcccacagccccaaatgcaggtggcctgatgcacttcgccgcccacctgtggatgcccttcctcgacttcgtattcatgcgccgtgcgctgatcggcggactggtactcgcctgcagcaccgcaccgctgggggtgttcctgatcctgcgacgcatgagcctgatcggtgacgccgtggcccacggcatcctgcctggtgccgccctcggtttctggtttgccggcctcagcctgccggccctaaccatcggcggcctcggcgccggcctgagcatggccggcctgtccgcatggatcacccgccgcaccggcctgcgtgaagacgccagcctggccgccatctaccccatctccctcgccgccggcgtgttgatcctcggcatcgccggcaagcgtctggatctgctgcacctgctgttcggctccgccctggccgtggatgaaaccaccctcaccggcatgctctgggtctcggggttcagcctgatcgccatggcggtgatctacagaccgctgttgctggacaccctcgacccgctgttcctgcaaaccgtcagccgcctcggcccactggcccacgggttgttcctgaccctggtggtgctgaacctggtgatcggtttccaggccatcggcgccttgatggtggtgggtttgatgatgctgccggccatcgcttcgcgtttctggagccggcgcctgccggtgttgatcgcagtatcggcggtgctgggatgcctgtcggtatggctgggtttgttgctttcgttctactactcgctgcccagcggcccggccatcgtgctggtggctggcgccgggtatctgctgtccgtggtcttcggtccggtgcacggcttgctgcgccgcccgccctcccttacatcccaatgaggtgtttcccgatgcgcgctttactcgtgctgttcagtctgctgctgccgctgtcgatggcccaggccgccgacaaactccaggtggtgaccagtttcagtattctcgatgacatcacccaccagatcggtggcgatcacatccagatcagcaacatggtcggccccgacgccgacgcccatacctacgagccaacgccggacgatgccaaggcgttgctcaaggccaagctgatcatcaagaacggcctgggcttcgagccgtggctggaccgcctggtggccagcaccgaaaccaaggccaccgtggtcaccgccagcaaaggcgtgatttcccacaccatggaagaagacggcgaaaccattcctgacccacacgcctggcataacctggccaacgccgaaatctacgtgaacaacatcaccaaggcgctggtcgccgccgacccggcgaacaaggcggattacctgcgcaacagccaggcctacctgaaagaaatctaccgcttgctggccgaagccaaggccaagttcggtgcgctgccagcaggcaaccgccgcatcgtcacctcccatgacgccttcggctacctgggccaggcctacggcattgagttcctggcgcctcagggcttgtccaccgaacgtgaaccctcggccgccgaagtcgccgcgctgatcacccagatccgcaaagacaaggtcaaggccgtgttcatggaaaacatcaaggactcgcgcctgctcaagcagatcgctgacgaaagcggcgcgcagatcggcggcacgctgtactccgatgcccttgctgcagaaggcccggccagcaccttcaccgggttgttcgagtacaacctcaacactctgtgtgcggccctgagcaagccatgaccctgagcatgctcgacctggaaggggctgccgtgggcagccgctttccactggaacctgtactcgatgcactgccgtggaacagcgacggcctgatcgccgccattgcccagcaacacggcagtggcgtggtgttgatgctggcctggatgaaccgccaggccctcaaggaaaccctggccaccgggcaagtctgctactggtcgcgctcgcgccaacagctatggcgcaagggcgaaagctccggccattggcaacagctggtcgaagcacgcctggattgcgacggcgacgctgtgttgctgatcgtcgaccagcaaggcccggcgtgtcacaccggccgccccacctgcttctacaacgctatcgatggcgaccacgttcacatcatcacggagccctcagcatgatccgcaaaaacccgtccggcgatcttcccgtcattgccgaatcggcctacgtcgacaagaccgcaatcatctgcggcaaggtcatcatcggcgagaacgtcttcgtcggcccctacgcggtgatccgcgccgatgaagtcgacgccagcggggacatggacccgatcaccatcggcgccaactccaacatccaggacggcgtggtcatccactccaagtccggcgcggccgtgaccatcggcgagttcacctccattgctcaccgctccatcgtccacggaccctgcagcgtcggcgaccgtgtgttcatcggcttcaacagcgtactgttcaactgtgccgtgggcgatggctgcgtagtgcgccacaactcggtggtcgacggccgcgatttgcccgccgccttctacgtgccctccaccacccgcatagggcccaacaccgacctgtcgcaattcccgccggtgagcgtgagcgcctcggagttttccgaagacgtggcgcgtaccaacgtcgacctggtgcgcggctacaaagccctgcaaaacgagttctgagccatgagccgcgtgctgattcgcaatgcccgcctggtgaatgaaggccaggaattcgacgccgacgtactggtcgccaatggccgcatcgagaagatcgccagtagccttgacggctataacgagccggtggaaatcgacgcccaaggccagtggctgctgccgggcatgatcgatgaccaagtgcactttcgcgaacccggcgcgccggacaaaggcagcttctacagcgaatcccgcgccgcggtggccggtggcatcaccagcttcatggacatgcccaacaccagccctgccactttggacctggaaaccctggccgataaaaaacgccgcgccgccctgcattcggtggccaactatggctttcacttcggcgtgagcaacgacaacctcgacaccgtcgccgccctcgacccgcatgaagtcgccggggtcaaagtgttcatgggtgcgtccaccggcaatatgctggtggatgacccgcggatcctggagcgactgttcgccgaagtgccgaccatcctgctggcccattgcgaacacacgccgagcatccaggccaacgaacaacgtttgcgcgagcgcttcggcgacaagatccccgccgtcgcgcacccactgatccgcgatgccgaggcgtgctatcgctcctcgtcctttgccgtggaattggccaagcgccatggcacgcgcctgcacgtgctgcacctgaccagcgcccgcgaactggcgctgttcgaagacaaacccctggccgaaaaacgcatcaccgccgaagtctgcctgcaccacctgctgttcgatgaccgcgactatcaccgcctcggccaccagatcaaatgcaacccggcgatcaagagccgcgccgaccgcgacgccttgcgcctggccttgttgagcaaccgcctggatgtgatcggcagcgaccacgccccgcatggctgggcgcaaaaacagctggattaccgtgaagcgccggcgggcttgccgctggttcagcatgccctgcccgcgctactggagttggtagccgatgggcacctgccgctggcgaccctggtcgcgaaaaccagtcaccgcgtcgccgatctgtttgccatccccgatcgcggttatctgcgcgaaggctattgggccgacctggtgctgatcaaactcgagcccggaggcaaaccggtcagcagccaaccaatcctggcccgctgcggctggacgcctttcgccgagcgcagctttcgccatagcgtcagcaccaccttggtgtccgggcacctggcctttcataacggtcaggtaatagacagctgccaaggattacctttgcatttccagcgctagagaagacggcgatgatccgcatcaccctgccagacggcacccaacgcgagtacgacggcgctttgtcagtttatgaagtggctgccagtatcggggcggggctggccaaggcagcggttgccggccgcgtcgagggtgagctggtggattgcgagcacgtgctggaacaggacacccggctccagatcatcaccacccaggatcgcgaggggttggaaattctgcgccgctcctgcgcgagcctgttggcgatggccgtcaaacaactgtttcccagcgctcaacgggtagccggggcggtagtcgaagacggtttttactttgacttggcctacgaacgcgtcttcacaccgaccgacctggaactgctcgaggcgcgtatgcgccagctggcaaacaccaatcattcggtacggcgcttgggagattttgacgccccaagccaaggccccctcgtgccgagcacgggtgtgatccaggccttcaaactgaccagggttgtcagcaatgcgtcacagcagcgcatcacaggcacctgctgggccagccagcaggtggcggtgctcacgatgagtcaacaccaggtcgacttcggccagcaggtatgcgatgcactgaaaggcgtgggcgtgcgggcgatcatggaccggcgcagcgagaagatcggctacaagatccgcgaacacagcctccacaaaacgccgtatttggtgatagttggcgagaaggaaaaaaccggcggttacgtcagcctgcgtagccaccggggagaagacctcggccagatgagcgtcgaggccttgtgcgaaaggcttaagcgcgaggcttgaccgtaccgcaatcgttacccagccactgggcgtggctgtccaggctgcccttctgctgaatgccggtggcattgaaggtgccgttgacggtggtcgtaaactctttctggctttggaacgtagctacacccgtgccctgggctttcgggcaactgaaacggaatttccactggttgccggtcttgtcggtcacttgctgtttgcagcccgattgcgggtcggtcagggggatagaatcagaggccacctgtgccggcgtcaggcacacctgcacgcctttgccagccatggtgatgccttgtttttccagcatggcgcgctgctcaggggtcatctgctgcttgagttgaccgaggatcagcgacaggtccggcaggtcctggttatcgactttcatattgctggtggtcaattcccacaagcccggcgccagcatctgcgcctgtgctgccacgggcagcgacaaaccaataaccatggctaaaccaaacagacgagcattcatcgggtaactcctgggcaattgttggcgttagacgccgcaaaggcgtcagtgttgcacgccaaataaaatagcgacattcgtgaccgaacatggtctgttaggcactggattgtctggagtaccgtcgtccatggatttttttggcccgcacctgctcgcctacttcatcgccacgctgcactttctcgggactctcgccgcgatccacgcggtgctgaccgtcaggaccgcccaaggctcgatcgcctgggccttgtcgctgatgttcatgccctacctcacgttgatcccttacctgatcttcggccgcagcacgttcgacgcctacatccaggcccgccgccaggccaaccaggaaatgcacaccgcgatcaccgcgctgaactggcgcccctgggtcgaggaagccctggcagcacgcaactccagcgcctacacctctttgcgcgccatgcccaagctgggccgcatgccgtgcctggccaacaatgaagtgcgcttgttgatcaatggcgaggccacgttcagcgcaatcttcgaggcgatccgcaacgccaggacagccgtgctgttccagtttttcatcattcatgacgacgagcttggccgccaactgcacgccctgttgaaggaaaaagccgctgaaggcgtagacatccacgtgctctacgaccgcatcggcagccacgccctgccccatcgttatgtacaatcgctgcgcgacgccggggtaaaagtcaaagcgttcgccacccgcagcggctggctcaatcgcttccaggtcaacttccgcaaccatcgcaagatcgtggtggtggacggcatcaccgggtttgtcggcgggcataacgtcggcgatgaatacctgggcaagaaaccaccgctggcgccgtggcgcgacacccatgtgcaggttaccggcccggtggtggcgtgtttgcaggagtcgtttgccgaagactggttctgggcggcacgcgagttgccgccgctgatcctgccggacgcctacccggaagacggcgtgctctgccaattgcttgccagcggtcccgccgccccatatgaaacctgctcattgttttttgtcgaggccatccacgcggcgaccgaacgcgtatggatcaccagcccgtacttcatccccgacgaagccgtgttcgccgccctgcgcctggcggtgctgcgcggggtcgatgtgcgcctgttgctgccctcacggcccgaccaccgcatcgtctacgcggcgtccagcctttacgcgatcgaagcggtgcgcgccggtgtgcgggtgttccgctacacgccggggtttctgcatcagaaggtggtgttggtggacagcgaaatcagcgccatcggcagtgcgaacatggacaaccgttcgttccggttgaatttcgaagtgatgttgctgacggtcgacgaagccttcgctcgggaagtcgagcagatgctgctggacgacttcgccctggcccacgaggtcagccagcaagaaagccgcgagacccgccgcctgcaacaactgggcatgcgggtcgcgcggcttatttcaccgattctctaacacactgcggtgaaccctgtgggagggggcttgcccccgatagcggtggttcaatcaactcaggcattggctgacacaccgtcatcgggggcaagccccctcccacacttggaccttcattgttctcagaaacggggttagcggtagatatcttcccgcgtccacggcaggtcgtggctgccatcggcatggggtttcaccgccaggatctggtgcaggttgatccagccccgggcaaacgcgtacgcacaaccggccaggtacagccgccagatgcgtaacgcctgctccggcaccatcttcgccgccgcttccaggttgtcttccaggcgctcgctccaatggtccagggtgcgcgcgtagtgcaaacgcaggctttcgacgtcgaccacttccagcccgacttcactgagttcgacggtcatcatcgccaggtgcggcagttcgccgttggggaacacataacgctcgatgaactccccggcgccacgaccgaccgggcgaccatcggtgtgcttggcggtaatgccgtggttcatcaccaggccgccttcgcgcacggcgccgaacagggtctggcagtactgcgccaggttggcgtggccgacgtgttcgaacatgcccacgctcaccactttgtcgaaacgaccgtcttgcggcaggtcacggtagtcgagcaattgcaggtccacctgatcttccaggccctcggccttcacccgttcccgggccagtgcgagttgctccttgctcagtgtgatgccaaacactttgaccccgaactcccgcgcggcaaaccgcgccagcccgccccaaccacagccgacatccagcagatactcgcccggctgcagccgcagcttgcggcacaggtggcgaaatttgtcttgttgcgcctggtcgatggattcgctgccggtttcgaaataaccgcaggagtacgccatatcctggtccagccacagctggtagaactcgttggacaggtcgtaatgataggaaatggccgctgcgtcggtggccttgtcgtggatcgagcgcaccggacgactcccctcgtcgtcttcgatcagggcatgactcaattcgtcacacacccggatgacctcggagatagagccttccagctccagtttgccctcgacgaaggcttcgcccagtgaatcgagcgtgggatgggtcagcttggtcacgaccgtggggtccttcaccacgatggtcacactgggctcggggcccaagttgaattcatggccgtcccagagtcgaagacgcagcggtagctgaagattctgtaaggccggtggaagttgcgcgagcatgagtagtccccccttgtttcagacgtctgctgtgagggtagaccatcccaagacaaagtaggaggctatcgatttgatagccgtcttctatggggctcggcgctcgagcaaaccgtcctggacccactgtttcagccacgtcacggcctgcagtggggcaccctctgcataagtgactgccagttccgcgcacagttctgaaaaactccagccggtggtcaccatgcctgccagggcgcagacttcagcgggttccaggctgcggtaatggcacacattctggtgccgccacaccaggcagatgtgcgccgggtcgagcgtatggctgtgggggaagtctgagtcatccttgctggcgcgccagatcgccacggtattgaagtggcagaggacctgttgcacggagggcgccagcgtgacttgcaggcccggccagtcttcaggcgccaggcttgccatgtcgtggagggtcagcggttcgccctgcggcgcatcaaacgccagggtaaacgcccactccaaccgcgccagctccgccagcggcgcactttgctccgccaccaggtgctcaaggataaacgtcgggaaacgctcacccaaccagcgcaggctgtaatgggccgagggataacggcgcacgtaggctttggtcagcgcggcgaattcatcatcccccaaccaatagtgaatggcgctgaagtcatgccgcaagacgtcctgcaaccgcgagatataggcgttgtgataaatcgccaggcccgtgtccacatccagcgtcggcccgcccagcagggtcgcggcgaagccactgttggccacgggtgtttcggataacaggtgctgttcaaaggccaactgccaatcggtcaggcgcataaaggtctcctggccaacgccatggcccccagctcacgggccttgctcagctcggtcagcaactcttcgaagggtgggaaatggtcgtcccgctccaacagcgtcgacacagggcccaggtgctccagcgtttgttgatagagcgcccacaccgggtcacacacagggtggtcatgggtatcgaccacgtagtcgccgtagtccatgtgccctgccaggtgcagctggcggatgctctgcggcggcaggttgcggataaacgtccaggcatcgaaaccatggttgcgcgagctgacgtacacattgttgacgtccagcaacaactggcaccccgacaggtgggccagggcgttgaggaattcccactcggtgaattcatcggccttggagcgcacgtagctggagacgttttccagcaccagcggacgttccaacacatcctgcacttggcgcacgcgggcggccacgtggtagaggctttcttcggtgtaaggcagcggcagcaggtcatgcaactggtgggcgctgccgcggctccagcacaggtgatcggacacccacgccggctggatacgctcggcgagctgtttgatctgcttgaggtagtcggtatcgagggcatgcggcccgccgattgagagggacacgccatgcatcaccaggggataacgctcggctatcgcatccaggtagtacaaggctttgccgccctggaccaggtaattttcggagattacttcgaaccaatccacggccggcgactgttcgaggatctgctggtagtactcactgcgtaaacccaggccgtaaccgaggcttggaagggaggcaggcataagacactcctgggaagtgtccgcagcggtgaggggcagccgctgcgggagcactgggttgccggttattcgccgacggtgccgcccttggcgtcgcacatcgacttggtcatcgacaggaagccctggcctttgcaagaaccctgacctttgcacgcatggtccttggtcttgcagtcgttctggcctttgcaggcgttgacgccatagcagtgaacggtggcgtctgcagcctgcacctgggtggcaacaccggcaaacatagtggcggcagccatagcgagagcggcaccagcagcagcggatttgatgttcattgttgtgttcctcatgatcgtaggggtgtcggtctgaacggattgttcagtctcgacataccactagagtgaggcccctcatccgcgttacagctgtgtgcaaaaatttctgaaaattattcttcaagcttcaaaaggggttcctgaaagcgcagcaaacgcccggcattgcccagtaccagcaaggtactgaggttatgcaacaccgccgcaatcatcgccccggcagcgcccaaccagccaaacgcggcgaatatcacgatagccaaggtccagcccagaccgatgatcacgttgacctgcagcgtctgccggcactggcggctcaagcgcacgcacgtccccaggcgccgcaagtcactgccgatcaacaccacatccgccgacgccagggcgatatccgccccgcccgcgcccatggccaccccgaccacaccggccttgagcgccagcgaatcgttgatgccatcgcccaccaccatcggccggaaaccgctgccgatttcacccagcacgcggttgagcttgtcttccggcagggcctgggcttcgacgtcgctgatgcccacgtccagcgccaggctgtccgcgacgctctggcggtcgccggtgagcaacagttggcgaccaaggccgaggtcacgcagctcttgcagggcctggcgggcttccggcttgacgctatcggccagcagcagccaggccaggaactgaccgttcaacgccagcccggcgatggggccatcgtggttcggcaccgcggtggtcaagatgcccaactgctcgaataactccgggcggcccaaggccgcttcgccctgatcggtctgcgccaccacgccgaggccctggcgttcgcggatgtccgtcaacgccagcatttgttcctgcgtcgccaaccccgccaatgcccggctgaccgggtggctgctggccgagcccaggctcgccgccaggttcaacagtacctgccggtccggcgccgtggtgtcgatggattgcaggcgcaaggtgccaaaggtcagggtaccggtcttgtcgaccaccagcgaggtcaggtccgccagctcttcgaggaacgccgagctgcgaatcagaatcccatgccgcgccgccacggcgatcccggcaatcgccgtggccggtgccgacagcaccaacgcacacgggcacgccgccaccagcacggcgagcatcgcctgggcgtcattggtcacaaaccaagtcaccgccgccaacagcagcaccagcaccatatagctgccggcataccgctccaacagccgcgtaatcggcggcttggaacgctcggcgttctgcatcagcgcgatgactttgcccagggtggactcgttcccggtgcgggtcacttgcaggcgcagcaacccatcgaggttgatcgccccaccaaacacctgcacacccacgctggcttccagcggtaccgactcaccggtaatcggcgccgtgtccaggctcgcctggcccgacagcaccacgccatccgccggcacccggtcgccggcacgcacctcgacgatgtcgccggtattcagcgtgccgttgtccacttcctggatgctgccatcggcctgcaccaaacgcgcatggctgcgggtcagcttgcccagggcatggatcgcctcctgggaaccgatcacgctgcgttcttccagcacatggccaaaaatcatgatgatcggcaacaacgcggcggtcagcaggtcacccgtagcccaggcgcccagcatggcaagagcgatcaactggtcggtgataccgtgcaggctcgggaaccgcaggctgtaccaggccgaacgcatcaccggcaccgccaccaacagcgacgcgacacccagcagcaactggctcacgccgctctggtccggcgccagccagcgccacaccaggcccagcaccagcaaccccagggccagcatggccagggtcaattgccgggcagcactgcgttgctcggcggaggtcagcatgggtgcgctcattgttcggctccctggatgatcaagcgggagtcgtctttcggatcgaccgtggtcaccgaaccggcctggccgagaatcttcggcaggcgctcgcggtacaggcgcagcagcaagcccgggtctttcacctgggccaggctggcgaccgtggcggtttgcgcctgggcattggccaggcgttcactggcctgggcatgggcgacttgcaccaggcggtcggcctgctgggtcgcggtctgggtgagtttctcggcgtcggtgcgcgcgttggccacggctttatccgcctgctggctggcggtgagcaccgcattgaaggcattcaccgccgggcccggcaggctcgactgcacgtcgacgcgggtcacttcgatgcccaaccccaagcctgtggaagccaactccacgagacgcttattgatgccttgcaccaggtcgccgcgcagccgttcgcgacgttcggcggcgccgttgtcggtgccgatcagttcggggcgtgccaccaggatcgtatccaggtcacgcgcagcggtcagggccacggcgctgcgggtcaccaaccgatccagggccggcagcacatgctcgccctgcaacacaaaggcgtaaggctcggtgactttgtagaacacccgcacatccagctgcaccacgccggcatcgccagtcagcaggtaaccggaaccggccagtgcatcactcaacggcgtggcaaaactggcgacgcggtcggcctgggtcgccgcatcggaacgcaacaggttctccacccgacgctcgatcacccggtcggccgccggcaacagcaccacctgctcgaacggccgcggccaggccagcaacagcccggcattctggatgcggtcgagggcgccgaagtgcagcaccacagcgcggttctgcgggtcgatctggcgcacattggaaaacgcccaggccagtgccgccaatacagtcaccgcatacagcgccaggaaggccaggcgcccggcctggatccacgggctgtccgggctgtcacgctcggtcatggctggatgtccttcggcccatccaccaacgcgcggaacggtgcagcgtcggtgcgcaggatgatcttggtgcccggcgtgaccacggtgcccaaggtatccagcgagcgcagcaggttatacaactgcggattgccggcgtaggcgcggccatagatctgcgcggcttcgacccgggactgggcctcgatatcggcggctttcaccgtggcgtcggcctgcacgatgcgcgcatcgcgctcggcggcagagcggatctgcgccgcctcgcgtttgcccacggcggtacgttcggtggcgatggtttcacgctcggcgcgcatgcggtcgacggtggccgtcagggtcaccgacggcagcgtcagccgttcgatcccgacctggaccacgcgcacgccgtaggtattgagcaattgttgatcaatctgctggcgcagttgtgcttcaaaatcagcgatgcgcacctggctggcatcggtgttgatcaggctagacaggtcgaagctggccgccgtggtttccagcgccgagccgacaaaggtgcggatctgccgcgccgcttcatccggctggttctgcaccgcacgcatgaagcgctgcacattatccgcatcgccctgcacctgccacgccacgtacgcctgcacgatgatgcgcaggccatcgcgagtgcccacatcctgcaaaccgctggaggtggtgcgcaggcgcaagtccaccgggatcgccgcttcgaacggcgccggccaacgccagcccaggccgggctccagcaacacccgcgccgggttgccgaaccgggtaatcaccgtggcctcgccggaccgcacctgcaccaggctggcggccgcgaccgcaaacagcaccagcaacaccgcccaggccatgcgccgccaggggaatgggccggcgtgctcatcagcgtgatgatggtggtggtgatggccatgatgatgaccgtgatcgtgagaatgagcgctcaacggaccgactccttattgaacggctttacgcggctgcgaaggatcggccggcaaggtaaaagaacgcagatcgatcgttggcgcgccatcggcgcccaggcgatgatccaggataagcagcttggcgtgggccaggccctggctgagttgacccaagtactgttccagcacgaacgcctggccggcggtggcgtaggccttttgttcggcggcaaaacgcaggtcggcggcctgggcgccggcgttcacttcgcgggcggtggccgtggcctggtcgcgggcggtgctggcttgcagcacggcctggttggtttgctcgctggccgcgccgcgctcgcgggagatcagcgcctgggctccgatctgcgcggcttgcacgccgtggtaggcgttggcagcgccggccggtgggtggatcgcctcgaccaccgtggcgaggatttccacaccgctgccgagcgtttgcaggtcagcctgcacggcgcggccgatttcgtcggccaggttcgtacgttgctcgccgagcaattcgtcaagggtgcgcgaggcaaagtcatgcaccaggatgcggctggcggtgctgcggatcaggctcggcacattggcgctgttataggtggcagcgagcgcggcctggtcggtgaggccgatgcggtagacgaaacgcacgtccatgttgacgatctggaagctctgcttgtcgccgctgctgctggcgatcacctgggacttgtcgttcacatgactggcgtcccacaagcggttggcgatcagcggcgccgggccttcggcaggcgccaactccggcgtagcggcgtcgctgacgctggtggccagctcatgcaccacgccgttctcgacgctgatcacacgacccaacggccagggcaagccagcatgcaaaccggggccgaacacctcgacgggcttgccgaagcgctcataaatcccacggccttgcaggggcacttcgtgcacgccggtgagcacccaacctaccgccagcaccaccagcagcaccggcaggaacgcccggcgcatgtaggtaaacgcccagatctggcgcaggtcgatgccgaagcggttgtgcaattcgtgctgcaaggcgagcaagggttgaggcggccagcgcagcagcccggcgatgaaactgtgcgccatcaggcggggctcaaggcggggctggcgtgggctgaacagcgacaacacggccctcagtacaaactccagcgagaccagtgccggcagcaggccgatcaacaccgccaggcgcaatggccagatggactcggcaccagcgaacagcaggcaaatcgcgctgactaccaggcacacaatcgccacccgactcaactgcgcgagctgcccggcttccggccattgcgcggcggtttcctgggccaggcgacgttcgaacaccagcaagccaaacgccagggccaacgccagcgcggcgccgatgctggcagactggccgaccggtgcagcgggcaaccccaggttccagaactcgacaatgctgatcaacgccagcaacgaccagccaccaagccacaacacgggtgcgccgatctgcttggcaaaacgcagcataaagcgtgcatagcggccggggtcttcaagcggcacttcaaccgcaggttcttccaacgcttgggcgcgccaatccgccacccaccacgccgactgcagcccggccaccagcaacagcaacgccgatgcgcagttgatcaacaccaccggccagatcgacagcggcgcaaacagcgcgacaaacagcgccagcacccaaccggcaacggccagcaccgtcaggctgataccggcctggcgcaatcgacgggcatggaactgcccttgttgaaaacgcggaaggccttctaccgaagcaccgtcagtttccagatccacttgcatccactcaacgcccacgtgtacataattcgttacgatataacacggagcgtgaaatttttgttcgataaacatcgcgttaagcggtacaccgttcccctgtgggagggggcttgcccccgatagcggtgtgtcagtcaacaccggtttcaactggcccatcgccatcgggggcaagccccctcccacatttgatctcccgcaccgtcaagatcgtgactaaccccccagaaacacgcgccatcactggtgcaggcgaggattaatcggcacactccaaaacagtttttcgcgggtccacggacaaggaagcgtcaccccccatgatttcgatctatcagctcaaaccgcgttttcaaaacctgctgcgcccactggtgcagcgcctctacgacaatggcaccaccgccaaccagatcaccgtcttggccggcgtggtttcgctgctggtcggcctgctgatcgccagcttcgccacccacctgtggctgttcgcgctgattccgctgtggatgatcctgcgcatggccctcaacgccatcgacggcatgctcgcccgggaattcggccagcagtcgcgtctgggcgcctacctcaatgaactgtgcgacgtgatcgccgacagcgcgctgatcctgccgtttgcgctgatccccggtgtgagcctggcgccggtgctgctggtggcgctgctggcggtgttcagcgagtacgccggtgtgctggggccgatggtcggtgcatcgcgccgctatgacggtccgatgggcaagagtgatcgtgcctttgtactcggcgtattggccaccggtgtggcactgggctggctgggcgccggctgggtcgacgcggtgatgtggctggtggctgccctgctcgcctacaccctggtcaaccgggtgcgccagggccttaaagaacaacaagaaacctcaccgattgcataaggacttttgcgatgcgcgaacagcagcagcacaccttcagtacccatgatggcgtcgagcttttttatcggcactggccggccacggaaaacaccggccagcgccaggccatcgtgctgttccatcgcggccatgagcactcggggcgtatcgcccacttggtggatgagctgaacctgccgcaattcgacttcttcgcctgggacgcccgtggtcacggccagtctcccggcgagcgcggtgacagccccagcttcgccaccagcgcccgcgatgtgcagaccttctgcgaccacatcggcgccacgtatggcatcaaggaagaaaacttcgccgtcatcgcccaaagcgtcggcgcagtgattgccgcgacctgggtccacgattacgcgccgaaaatccgtgccctggtgctcgcctcgccggcgttcaaggtcaagctctacgtgccgttcgcccggccgggcctggcgttgatgcgcaagttccgtggcaactttttcgtcaacagctacgtcaaggccaagttccttagccatgacccggagcgcgtggcgtcctacgacagcgacccgctgattaccaaggccatctcggtgaatgtgctgctgggcctgtacgaagcggccgaccgtgtggtcgccgatgcccaggcgatccaggtgccgacccagttgctggtctccggctccgacttcgtggtgcaccgcaaaccccagcagcagttcttcgaccgcctgggcagcctgaaaaaagagctgcacatcctccccggtttcttccacgacaccctcggcgaacgtgatcgcgccagcgccgtgagcagcgcccggcgcttcatcctgcagaacttcgaacacccgctggaccgcgcttcactgctggacgcggacaaactcagcgccacctgcgccgaatccgaagcccttgccgcaccgctgccgcgcaactccctgcgcgacctctactggcgcatgacccgcgccagcatgggcttgggcaagaacctgtcggacggggtgaaactgggcttcgacaccggtttcgactccggcagcaccctggactacgtgtaccgcaacacgcccaccggcaagggcgggctggggcggatgatcgacaccaactacctcaactccatcggctggcgcggtattcgccagcgcaagctgaatgtggaggagctgctgcgcctggcgatggccaggttgcgcggtgaagatcgtgaagtgcgcatcgtcgatatcgccgccggccacggtcgctacatcctggaagccttgcagggcgtgtcgccactgccggaatcgatcctgctgcgcgactacagcgacatcaacgtgcgcgacggtggcgcgttgattcgcgagaagggtttgggggatatcgcgcagttcgtcaaaggtgatgcgttcgaccgccaggacctggcggcactcgaccccaagccgaccctcgcggtggtgtccgggctgtatgagttgtttgccgataacggcatggtcggcggttcgctggccgggctggccgaagcggtggagcccggcggttacctggtctacaccggccaaccgtggcacccgcagctggagttgatcgcccgcgccctgactagccatcgccagggccaggcctgggtgatgcgccggcgcagccaggcggaaatggatcaattggtggaagcggctggtttccgcaagatcacccagcgtgtggatgagtggggcattttcaccgtgtccctggcacagaagatctgaacatgcgcgaacccggtttattgaaacctgcggtgctgtggctgctgctgttggcgccgctgttcttcagcacctacggctttgccacctgggtcaccagccagcgcagcgacgtcgtcacgctggtgttcggctgggaaacccatatgccgttctgggcgtggaccatcgtgccctactggtccatcgacctgctctacgggttttcgctgttgttgcccaacacccggcatgagttgaagcaacatgcgctgcgcctgctgagtgcccaggtgatcgccgtgagctgcttcctgatctggccgctgcgtttcaccttcgaacggccggaactggacggtgtgttcggctggctgttcgcggtgctggccgggttcgacaaaccgttcaaccaggcaccgtcgctgcatatcgcgctgctggtgatcctgtgggtcatgtaccagcgccacacccaaggcttttggcgttggctggtgcatggctggttcgggttgatcggcatttcggtgctgaccacttatcaacatcactttatcgacttacccacaggcgccctcgccgggtggatctgcgtgtggttgtggccggtggaacatccgagcccgttgttgagtgcacggctgacgcgagatcccacgcgttggcggttgggcatgcaatatggacttggcgcgatgctgttggcgattccagcatttgtattgggcggcgcctggctgtggctactatggccggcggttgccctcgccttgatcaaggccaattacttcgtgctgggcgcttcgggcttccagaaacgcaccgacggccaactgacccccgccgcacgctggctgtacgcaccgtacctagccgccgcctggatcaactcgcgcctgtggacacgcaaacatccacagcccgacctgattgtggataacgtctggctcgggcgtattcctaccacaagcgagcaagcgcccttcaaggccatcgtcgatctgtgtgccgaattgccgattaatccacaggggcgcgcctatcaatccatccccgtgctggacctgatcgcaccgaccccgaccgaatgcctgcaagccgcccaagctatcgagcatctgcgcgccagcggccccgtgctggtgtgctgcgccctcggctactcgcgcagcgctaccgccgtcgccgcctggttgctgcacaacgggcgagccgcgacggtagagcaggcgctgactatcattcgtacagcacggaccgatgtggtcctgcatcccgcacaccgagaagcgttggagggtttgccccatgcccgctgatatggaactgctggtggttgccagcctgctgcgtcgtggccgttcgctggatcagttatccacaggcctgaccctggccggtgtgctgttcggcctggcgcagttgttgatggcgagtatttcgatcatctgcctgctgctcagcctgtggatgattatcctcgggctgctgcaaaagtactgggcgctgcgcgtggcgttcgacgccgacctgttcgccctgctggcccgcgacatcgagcgcacgccggacctcgaccaggcactgctgaccctcggcctgcaatcggccaagcgtatcggccggccctggaccgaacgccgtcgcggcgccctcaaactattgcgcaaacaagcctggctgctcggcgcgcaagcgctgctgaccctgggcgtgatcctcgccagcccctggctgcctttcgccggataaggaatccccatgttcgaacccgtggtcgccacgctgattacctccatggcccgcaccgtcaccggcgcccgcagcctgtggttgggctgcgcgccggtgccagtgcaacgcatctacttcgccaaccacagcagccacggcgactttgtattgctgtgggcgtcattgccgcagaacctgcgcaaattcacacgtccggtggccggcagtgattactggaacaaaagcgccttgcgccgctacatcatcaaccgcgtattcaacggcgtgttgatcgaccgcgaacgcaaggaccctgtggataaccccttgcagccgatgctcaacgccctggaaggcggtgactcgctgatcattttcccggaaggcacgcgcaacctcgaagacggcctgctgccgttcaaaagcggcctttatcacctggcgaaaagttacccacaggccgagttgatcccggtgtggatcgccaacctcaaccgcgtcatgcccaagggtcgcgtgctgccgctgcctttgttgtgcaccaccagcttcggcgccccgctgcaattggcagacggcgaagacaaagccgccttcctcgcccgtacccgcgatgctctgctcgccctcgccccggagcacgtctgacatggctagccaaaccctgatgttgttcggcggtatcggcgcgatcctggtgctagcctcgctgatcggcctgatcctcaagctgcgcacccgtggcacgcccaacacggtgatcgacaacctcaacgcccggatcaacgcctggtgggtcatggtggtggtcatcggcatcgccttctggctcggcaccggcgcggtgatcctgctgttctacgcggtgtcgttctacgccctgcgcgaattcctcaccctcacccccacgcgccgcagcgattaccccgcgctggtcgccgcgttctacctggcgctgccgctgcaatacctgctgatctattcggactggtacgggctgttctcgatcttcatcccggtgtacgtgttcctgctgctgccgatcctcgcctccctgggcggcgatagcacgcacttcctcgaacgcgcctcgaaagtgcaatggggcctgatgatcgcggtgttctgcgtgtcattcgtgcccgccctgctcaccctcgacattcccggctacgaaggccgtaacctgctgctgatcgcctacctggtgatcgtggtgcagctgtcggacgtgttgcagtacgtgtgtgggaagttgttcggcaaacacaagatcgcgcccaacctgtcgccgtccaaaaccgtcgaaggcttcgtcggcgggattctgctgtcatccctgatcggcgctgcgctgtggtggaccacacccttcaacccgtggcagtcgttcctgattgcactgctgatcaacctgctcggctttgccggcggcatcgtgatgtcggcgatcaagcgtgatcgcggcgtgaaggactgggggcacatgatcgaagggcacggcgggatgctggatcggctggattcggtgtgctttgcggcgccgatcttcttccacttggtgcgctactggtggacctgaagtcaccgctccaaggccaaataacgatcaacatgtgggagggggcttgcccccgatgacggtgtgccagacaacacatgggtagctgacacacagcaatcgggggcaagccccctcccacattcgttctgtggcactgtgccgaaaggttgaatcattccctcaaggctgccggctccctgatggaaatgcccgcgttttcgttaacgtttttcgcgagcaagctcgctcctacagtgattcaccgccattagcccggcaaatgccccagcggcaacgtccctggggttttcacggtctggatcgcgaagttgctgcggatgtccctcacgcccggcagcttcagcaaactacccgtgacgaaccgctcatacccgcgcaaatccggcaccaccacctgcaacagaaagtccgactcccccgacaccaggaacgccgagatcacttccggcaacgccgtcaccgcctcgcggaaggcattggcctcggtgtcgttatgccgctccaccttcacgcccacgaacaccatcatccccagtcccacttcgtcacggtccagcgtggcctggtagccgcgaatcacgccggcttcctccagcaggcgtacccgtcgcaagcaaggcgaggcagacaggccgatttcgtcagccagttgcacattgctcaagcggccgtcacgttgcagggcttcgagaatcttgcggtcaaacgcatcgagtttcagatttggcataaatgaatggccgatcagatattcagtggcagagagtgccaagactagacgcttttctggctgactacgcaagcacctgccccgcccttgcgccctagaattggccgacacacaaggggggtgaaacatggcggaactctggttattcctggtggctctttcggtggcgtatctactgccggggccggacatgatcctgctgctgcaaaccggcgcacgccagggcaaggccttggcgctgaccacggcgattggcctgggattggcccgcgcctgtcatgtggcgctggcgggcatgggcttggcgacgttgttcaaagtggcgccctggaccttcgatgtggtgcgcctgggcggcgcggcgtatctgctgtggcttggcgtgcagtgcttgcgtgcgaacatgctgccggtactcgacacggcccatagcgccacaccggcccgcgcctggcgtgcagcctttcagcgcggcctgctcaccaacctgctcaacccaaaggccctgctgttctgttcggtgctgctgccgcaattcatcaacccgcaatccggccccgtggcagcgcagttcgcgttgctgggtgtgatcctggtggccgtcggtttcgccttcgactgttgctacgccctggccggggcgcgcatcggtcagtggctggcacgcaatcgctcggcgcagcgtgtgcagcagtggttattcggcagtcttttgatcggttttgcggtgcgcctcacctttgtgcaacacgcctagcgggtcggcgtatctgcgtcatcttttgtatcaaagacgcgtgtaagatacgccgcacttagccagggatgctcaccatgttcgattcgttcaaagcgatcagccgccgtattgtcggtgcgttattgactgtggtgggggccgtctttggccagtggcatccgccggtctggctgcgtgccgttggccgtgggctggctaacctgggcagccaagcccgcgcttatccacgtcaaaccggtgccggcgtagtaggcctggcgttgctggcggccgctggtttctatggctggcactggtattccaacctgccgcaaccacataccgcgagctattcgctgcacaaaccgaacctcaccgactacacccagcccacgccggttgtggataacttgcaggtgcgcttcggcgaatccgtggccccgctggcggccatcggcaagccggtcactgagggtatcaccctaaaacctgcggtcgcaggcacctggcgctgggcggacgaccgcagcctgttgttcgtcccggaaaaagactggcccatcgacgcccattacaccctcgacctggcgaagaaaaacctgctggccgacggcgtgttgctggaccagtacagcacgcagttttccacccaaccgttccgcgccaccctggcgcaaaacgagctgtaccaggacccgtccaacccgacgctgaaacagctggtggcgaccttccgtttttcccacccggtagatgaagacagcctacgcaagcgcgtcacagtaaccctcggcaaaggcttggcctaccgcgacgcccagttgcccaaccggccggaaatcaccttcgacgagaagaaactcaacgcctacgtacgctccgctgccctggccacgccgctggaaagcacgccggtcaacgccaagctcgacgaaggcatcaaggcccgcgacggcggcaacgccagcaccgcaccgctggtggcggaagtcaccgtgcccggtcgctatcgcctgacctttaccggcgccgaagtgagctttgtcgacaaccaacgtggcgagccggagccggtgctgatgttcagcagttccagcgccgtggccgatgagaccatcgccggtaaggtgcaggcctggctcctgccggaaaaagcccaggacgacacgcgcccctacagcagcaacgacatcgatgacgccctgctcgcccgcagcaccaaaatcaacctgacccacgtgcccagcgtcgagccgctgaacaccctgcacgccttcaagttcaaggccccggccggtcgcgcggtgtatgtgcgcgtacccgccaacctggaagccatcggcggctacctggcaaaaaatcctacggcgtcgctgatcagcatgccggcgtatccgcgtaccttgcagttcttgtccgatggcgccttgctcagcctcaacggcgaaaaacgcctgggcttcatggcccgtggcgtgcccggcgcccatgtggaaatcgcccgcctgttgcccaaccaattgcaacacctggtggatcagagcagcggcagctttgcccggccgaacttcggcaacgaatattttgatcgcatggtcgagcgtcaggcgttggatatcccgctgtcatccaatgacccggcgaaaaccgtctacgacaatgtcgacctcagccactacctcacggccaacggcggtcggcgcggcattttcgtgctcaagctcagcccgcaggacgacccggccacgcgcacgttcgagtacgaccgcagcagcaccagcgacctgcgcttcatcgtggtgacggacctgggcatcatcgccaagcgctccagcgatggcagccatgacgtgtacgtgcagtccatcggcaatggctcgccggtgtccgatgcacaagtggacatcatcggtcgcaacggtttgccggtaagcagtggccgcaccgacgccgaaggccatgcgcacttcgccaagctggatgaattgcgtcgtgagaaaacgccgctgatgtacgtggtcacgcgcggcaatgaccagtcgttcctaccgatcgcccgtcagtcccaacaattggatttgtcgcgtttcgacgtcggcggcctggaagaagacggtgcgattgatcgcctcagcgcctacctgtttaccgatcgcggcctgtaccggcccggcgaaaccgcgcacctgggcatgatcgtgcgcagcggcaactggaagggcatgctgcaaggcctgccggtggagctgcaaatcaccgacccgcgtgggctggaggtgattcgccagccgctgaagctgtccgccagtggctttgaaacctttgatttccccagcagcgaagtcgcccccgccggggagtacaccgcgaccttgcagttgattggccagaaacagacccgcaccgacctgggcagcgtgagcttcaaggtccgcgacttcgagccggaccgcatgaaggtcagcctgagcctgcatgacacgccggtgcagggctggattccaccggaccaagtggtggccaaggtcaccgccatgcacctgttcggcgccccggcgtccggccgacgcgtgacggcaaaaatgtccctgagcccaacgcttgcggcctttgatcgctacccggattaccgtttccgccttaacgatgccctggaagacgccacgaccgaagacctggccgaaaccaccgtcgacgacaacggccaggccgtgctcgacctcaacctgcagcgcttcgccaacagcacctatcgtttacaggtgatgacccaggtgttcgaggctgaaggcggtcgcaatgtggcggcgcaaagtgccttgctggtgtcgtccgcgccctacctggtgggtgtgaaaagtcaggattcgttgtcgtacgtcgccaaggatgcaccgcgccaagtgcaatggctggctgtcgcgccagacctgacaccgctggcggtggacggcctgaccagtgaagtggtcgagcaccgttatgtgtcggtgctggtgaaacagtccaacggcacctacaagtacgagtcacgcatcaagaacatcagccagcccgcgttaccgttgctgatgacgaaagaaggcgccaagcagaccctgaacacctcagcgccgggcgactttaccctgcaactcaaggacgccaacggcaacctgctgaaccagatcgactacagcgtggccggacgcggcaacacctcgcgctccctggaacgcaacgccgagttgcaactgcgcctggataaacgcagctacgccaccggcgacgagatcgctatcagcattcgtgccccgtacaccggcgccggcttgatcaccatcgagcgcgacaaggtctacacccaacagtggttcaaggccgacagcaccaacagcgtgcaacatatccgtgttcccgcagggcttgagggcaatgcctacgtcaacgtgcagtttgtgcgcgacatgggctcggccgaggtgtacatgagcccgctgtcctatggcgtggtgccgttcagcatcaacctggatgcgcggcgcatggccttgaaggtggaaggcccggcgaagatcgaaccggggcagacgctggatatcaaggtcaacaccgaccgcccgggccgggccgtggtgtacgccgtcgatgaaggcatcctgcaagtggcgcgctatcagacgccggatccgctgggcttcttcttccagaagcgtgcgctggaagtcggcaccagtcagatccttgacctgatcctgccggaattcagccgtttgctcagtggggcggcgccgggtggtgatacggaaggtgcgctggccaatcacctcaacccgttcaagcgtaaacatcagccgccagtggcctggtggtccgggctggtggacttgccggccggcgaaaccgtgctgcattaccaggtgccggacagcttcaacggcaagctgcacctgtttgcggtggccgtggacagtgacagcgtgggtgtgagcgaagccagtaccgacgtacgcgggcccatcgtgatcacgccgaacgtgccggcctttgtggcgccgggggatgtgttcaacgtcagcgccggggtgttcagcaacctcgacgcagcggcggacgtgaagtttgaagtgcagaccagcaacggtctggtggtgcagggtgacaagggcagcacgctgtctctgcaaccgcgcaaggaaggcacggccgagttcaagatcaaggtcggtgacaccctcggctcggcggatttgcgctttgtcgcggtattgccggatggcaagcgcattcaggtcgcggaaaccacctcgatccggccactgagcgaacatcgcgtcgccctgagcctgggccgcttcgacagcgccagcaaagagctgaaaccgacccgcgaactgttcagccaactgcgcgatgtgcaactgggtgtggctgcctcgccgctggtatgggctaacggcctcaagcactacctggacgactacggctatgcctgcaccgagcaactggtgtccaaggccatgccggcgttgatctggggcggcaatgcgcctgaagccgagcaagctttcggcagtgcggtacgcatgctgcgccagcgtcagaaccaggccggtggctttggcttgtgggcggccaaccccgatgtggcgccctacgctagcctctacgccaccgacttcctgatcgaagccaaggagcgcgggctgccagtgccggaagacctgctggtgcgctcgaacgcgtacctgacagacctggccaacggtcctagcgaaggcctgtcggaattgcgcaaccgcgcctacgccagttacctgctgagccgtcaggggattctggtgagtggtgcattgagcgatatccgcgaacgctacgaaagctacttcaaggacagctggcagaacgacctcggcgccgcttacctggctgccagctacaagctgctcaagcaggatcgccaggccgataccctgttccgcaagattccatggcgttcccttgtggataagtgggacagcgacggtttgtactacgacccgctggttcatgacgccgaacacctgcacctgttggcgcgacatttcccggagctgatggacgatgtgcctgcagcgctgctggataaactcggcaagcgcctcaacgagcagcgttacaactcactgtctgcggccctgctgctgcgtgccctggacaactacggccagcgtgcgcaaagcgacatgaccctcaaggccactgcctggctgggtgacaagcagcagcaattgctggaaatggccggtcagccaccgcgcgccgccgtgccgggcgccacgcaaaagctgttgatggaaaaatccgacggcccagcggcgttctacatgctcagcgaagccggtttcgacaagggcgccaagctcaagccgatcaacaatggcctggaaatcatccacgaatacctcgacctcaagggcgagccggtgagcaaggtcgcggtgggtgatgagttcctggtacgcctgcgcctgcgcgctaccgaccgcgatcaggtacaacaagtggccgtggtggacctgctgcctggcggtgtcgagcctgtgtataacttgccgccggagccggaagacgccagcacggaggaaagtgagggcgaagagtccgagtacgtggaagcagacaaccaggaagaacaaagctggcaagctcccatcggggaaaccgagctgagcaactggcagccggagtatgtggatgtgcgtgatgatcgcgtggtgttgtacggcaccgcattgcgcgatgtaggcaccttcgtctaccgcgtgcgcgccaccaacgccggcaccttcaacacgccaccggcctacgccgaaggcatgtacgaaaccaccctgcaagggcgcggcaaagtaggccagcttgaaattaccaagccttaaacgcctggcgccgccgctgcttgtagcggcggtggggctggtggggctgcggctttggccgcatgccccgctggaacacgcggtcacttcatcgcgggtggtgttggccgacgacggttcgctgttgcgcatgacgctggcggatgacggtcaataccgcctgtggctaccgctggagcggatctcgccgtcactggtcgaagccttgctgctcaaggaggaccgcaatttctactggcacccggggatcaatcccccggcgttgctgcgcgcggccacggccacctacagcggtggccagcgccagggcggctcgaccttgagcatgcaactggcccggcgcctgtgggacctgaacacgcgccaggtgccgggcaagttgcagcagatggcgctggcgctgtggctggaggcgcgctacagcaagcacgacatccttgaggcctacctgaacctggcgcccatgggcggcaatatcgaaggggccgaggcggcgagccgcatctacttcggcaagtcggcggcgcagttgtcgttgtccgaagcgctggcgctggcggtgattccgcagcagccggggcgtcgggcgcgcttcgggccgtcactgcaacatgcgcggctgcgcttgatggcggattggcgcgagacttatccacaggacccgcgtaacgacagcctgctcgatttgcctttggaagcgcgtaaccgccagcagatcccgttcctcgccccgcacttgagtgaacaactgctggcctcccaaaccggcaatgagctgaacagcaccctcaacctgccgttgcagcaattgctcgaacgcctgatcaccgggtttatcgccgagcggcgcagcacaggggtggaaaacgccacggccatcctgatcgacagccgcgaccagagtgtcaaggcactggtgggttcggcggattacttatccacaagcctgcacggtcaggtcaatggcgtgctgtcgcgacgctcgccggggtcgacgctcaagccgttcctttacggattggcgctggatcagggggtcatccaccccatgagcatccttaaagatttgcccagtaacttcggctacttccaaccggaaaatttcgacggcagttttgtcggcccactgacagcgcgagatgcgttgatccgtagtcgcaacattccggcggtgtggctcgccagccaggtcaaatcgccctcgttgtatggactgctgcaacgcgccggcatcaagggcctgcgcgacgagagtcactacggcctggccctggccctcggtggcggcgagatgagcccggaagaactggcgcggctgtatgtgatgctggccggtgacgggcacctgcggccgctgcgctatttgcaggaacagccgcagtccaccggtgcgccgttgctcacgccccaggccgccttcatggtgcgcgacatgctgcgccgtaatccacgcccggatggcctgcccggccgccattggcgcactgcctggaaaaccggcacctcctggggctttcacgatgcctggagtgccggcctggtcggcccttacgtgctagtggtgtgggtgggtaacttcgacggccgcccgaacccggcgtttatcggtgccaagaccgctgcgccgctgttcttccgcatcgccgacgccctgcccctggccttgcccaacaccgtcatcaagcccgacaaaccgcccgccgggctggtgcgcatcgacgtctgcgccgcgtccggcgaactgcccaaccgttggtgcccgcaaacccgcaagacctggtacatccccggcatctcgccgattcgcgtgtccaacctgcaccgcccggtgctgatcgacacccgcaccggcaaggccgcctgcccgccgttcgagccgcagtacacccgcgaagaagtcttcgaattctggccgagtgacgtgcaacgcctgtaccgcgcggccggcctgcctcggcgtacgccgcccagtgtgatgaagaactgccagcccaaccgcctgagtgaccagagtgaagcgccgcagatccgctcgccgctgacccaggtgagctaccagttgcgcttgtctcaaccccaggaaagcatcccgttgaatgccaacgcggccagcgatgcggcgacgctgtattggtttgctgatcaaaccttgatcggccagggttcgccgcaagccacactgaactggcggccgggcaagtcgggggagtatcggctgcgggtcagtgatgatcaggggcgcagtgcgagtcgggggttgaaggtggagtttgtgccgtgatcaggtatcttcgtcgccgaagctcgccttgcccacacgcttggcaaaatggttgtacgccgcagccagttttcgttgttcaaagatagaaaacaccagggtacccagcaggatcagcatccacaccagaaacagcttcagcgtatccacatgggccacgaacagtagcagggtcactacgccgccaatcaccatgcccagccccatccacgcccccaacacacgacccacggccatgcgtatgcctttgggcaggaccaatcgggtggtcatcattaccatgatgatcgccaggaagaagccaaacgcggccatgaacggaatctgaaaaccaccttcgcggtacaaccaggccagcaaacgatacagcgggccgagttctaccatctgttgataggtgtccggacgcggcaaatgcaactgggtaatctgctcgggtgtgagggccatgatgcccacgccgatcattcctgcgaaggcggcatagaacccgcccgcacgccacagcggcgccagcacgcggcggctttccacatcctcggtcagcgccacaccgaacacggccttggggtatttgccctgggcaatcacggtctggccgtcccgttcgcaggcatcaccgatcagcatcacatcgaggtcctggataaggaggatttcaccctggcgacgggagctgccgatcgactcgtaatcgtcgggcgacttgttgccgaacagatcgatgccctcggcaatcacagggatttcgccgctggcatcctgcaggcgaaagtcattgcagcacgcctcgctcttggaccggctccagctccagcgcccgtcgtcatccttctcgccgtcctcgataatccacacgtagccggcgcaaggcttgtgatgcaccggcgacaacaacggcttgtccaccattaccttgccacgcagctccaccaagcccatcgccagcgaacgaatctggctcgtcgccagccgctgctcggtcttgtagaagctcggaccaaagctggccaggaggcagatcagcaggaacatcgggaaaaacaacgcgacaaccgtcatcggggcgtagatcagcaaaccgataaagcccgcaagaatcaccagcgccagcacgattttccacttcggctttttcaccacggcgcctaccggcgtggtcttcatgcccctggcacctcaagcttcacaccttcgtagcgggtttcttcggcgctgatcgccagcaacgggatgcgctgataactgagcaaccgcgcaaagaacaggtcggggaacactgcaatggcaatgttgtagaggttgaccgactcattgaagaactcacgccggtcggcaatgcgctcctccaccgacgagatcgcctgttgcagcgcgaccatgttcggtcccgagatcaacgtgggatacccctccgccaccgcaatcaccgacttgatcgccgcgttgagctggttggaggcatcgaccttgtcgttgaggctgctggcattaaggtactgctggcgagcttcactcaagcgcgtgaacagggcgttctcgtggttcatagcggtttggaccacacgcatcaggtccgggatctgatcggcccgctgcttgagcagcacgtcgatgttggcaaaggccttatctacatcattacgccgcatcaccagcccgttgtagaaccccaccatccagcccaccaggccgacgccaatgatcagcacgacgacgccggcgataaggagttcgatgttcatggtgaaggcattccctggctgagttatccacagggtcgcattctaggggtaaaaccggatcgcgcggcgggcactggcccacagaaccgacaagaggtcgctaatgggagatgcctgccctaagtgccggggctcgcttcaagtaagtgcacgtcttgttggatcagcctctcaacgaccttgcatcagctcacggtagattgtgatgtagtcggtaaccatccgttcagctgtgaaatacttccaatagcgctcctctgctcgcagcccccaaatacgtgcgtcttcgggatgctcccaaaggtattgcatcgcgcctcgtaacgcggcagggtcgcccggtggcacaactagcccagtgtcaccggatatattgataaaggtggtaccggtacctatctcgcaggaaatcatcggctttccatacatagcaccttccaataaagatatgccgaaagcttccgagcgaaggtgcgaaggaaagaccacggcataactcagctccagcagcgccaatttgtcactgtcaggcaactggccgaagaaatgcacattatccagccccaaggcgcgagcctgtgccttgagttcatcctcgattggccccgcaccgacaatgactatggggaattcagtgcctcgggccgcttccatcaggatgtgcaggcctttgtaataacgcatcacaccgacgaacaggaagaatttttgccccaccttcgtgcgccaggccttgagcgtttccggatccgcctttggataggtctcacggtccaggccgatgggaatcactgaaaccttgtctcgatagcgtgccaagactgcgctggtggccaggtagttcggcgaggttgccacgatacggtcgacgtcgcgcaagaaccagcgtttcagaggtctgtagagtttcagcagctgtttctggcggatgatgtcggagtgataagtcaccagcgtgggttttttgattctggtgatgaaatgcaccacgtccatgaagggccatggaaagtggtagtgaataacgtcagccctgcgcgcgagttgataaaagcgcaagaacgccgagatcgaaaatccggttgaggcgatttgcagatccatcctggcgtgatgcaccaggtaccccccgacatcaaccgtgcgcggaacctgtttggacgtcaaagaaagtacgtctgtctgcacaccctgcttggctgcgcccagggcgatctggtggataacctgctcgattccgcccatcgaccagggcactgaggttttataaaagtgaagtactttcatgagctccgaataatcgccgccatgcgatctacaaaggtttttttcgagaatttttcagcctgtatctcgcacgcgcatcgcatggcaagtgctctcgcaggattcaggctgttgatcgcatcgcgcaaagattccacgtccaactccggctccagcaatagtccggtcacaccgtccactatagtctctatcaagccaccttcacgtacaccgatcacgggctttccagcagacatcgcttccacgggcgacataccgaaatcttcatccgtcggcacatagatcgctgcacgcgcaccaccaatacaggcacgtaaactggcttcgctttgccaaccggtaaagtggatgttggcagcgccatcggcgagttttcgcaacgccagctcgtcccgaccaccagacgcaattaccagcttctgatcaggcaactcgagaaaagccttgataatggtatcaacccgtttatgacattccagcctcgccagggaaatgaagtaatcgccctgctctgtccatcgaaaacgttcggtatccacaggtggatgaatcacctccgactccagtcccaagtgtagacgcaggcgtttgcgcacactttccgagttggtaattacacggtccatacgcgcaagtgctccctcgtaacgccgctgaaaggcatcaaaggcaaccgttgccaggggacgcagcggcggtgcaaagcgctgcaaataacgttcgcgccagtcgtagagatagcggggtggcgtgtgacagtaataaatacgtgtgccgctgagctggtgggtaaccgccaggggcgcatacaagccgctgtagatcaccgtctgagcgtcgcgcagaaagccggtgcgcagcgtgaagcacgccagtgcctcggccactcggggtagtgagcgggtagaagtcgaacccaggcaacgtagcccctctgcgcctagctcctgctctgcagccagataacgcgcttgttcaaaaactcgcgagaccaccagttggtagtcaggcagccccttggccaagtcaatggatagccgctctgctccaccgctgacctgcaaatagtcgtagagaatgtagttgctcatcgcttactcgacccacgaaaacaggggtgccagcctgttgggccaggaggccgattgcgcatagtgctgataacgaggctcctggcctgtttcatacagcgcagcacgcaccgccacaatgaactcgtccgtcgatgaacacagcacggccgggctcttcaggttttccaattctgcccaacggctggaaactaccggcaggccagccgccaggtactcatagagtttgagtggatgaatattcgcaatcagtgaactgcacgcttccaggtgaaaggggatcagtcccacatgggcatgtcgcaggtagctggccatttgttggtgaggccgcacaccaaggaaatgcacgttgatcgacatgttggtcggcgtattggcacaggggccgatcagcacgaaactgacgtccggcatcgcacgggcacaagcctccaccatagccaggtcaacccagctgctgatatcaccaacgaatacggcaatcgggcccgcaagtgcagcgtattcatcgggcagcggcggctccccggcgaagcgctcgcaatcaacgccattgggcaggtacattacctcccgcgcgccatgctctaacgcccactgtgacaagccttgcgaggcggtaaccaccagatcggcgcgcatcattgtgctcatttcgctctgtagagcgccggcaccataaccctcaaagccggcgttgtagtcagccaggcgcatgacgcagcgcttgtagcggatctcatccagccaggcgggctgatagatgctgtccagaaacagcaagtcgacctcgccgaaaccggcatcacgcacaacctgactcacgttgggccaactcagcttgttccagtgtgaaaacaaccagggcgagcgcagaaaacgacgattggagggtgctaacaacgagaacggaacgtagtgccaaagcttgccgtcaaggtcactctgcccgccagcccggtactcctgaagacgcgtctggaataccaatgagtttggacgtagaaagttgatgattgagataggtgcagccacataggcgacttcccagccctgctccacgaactgggtagcgatggcatgactgcccacgcgcatcggcgacgtccagcagtgaatgcctacatgcagaactcgcttaaccatgaagaggctccaacaaacgcatgctccagacacaacgcgcgggtacatcacgaacacggataacttgagtctccaccttgcagccataaccgggtgagtaggcccccttttccaccgcggcctgtccagcggagatctccagcctgacctgcctgccatcagagatcagtaaccagccctgctcatcgcgcagcactcttatctgcggggccagcgggaatgccaactcgcccgcaccggcgccatactcatcgacaacctcgaagccatcgtccaggtacgccacactgcgtcgatgcgtagcggcaaacccgtcatgctcgccgcagaaaccgtcttcggtggcccggatcacgcgggtgcgcgcgactcgtgacaggctgaacaaaccggtaataccctccagccaatcattctgctcgccggatccaacactcaacgtggcatgtgcccgattggagcggaatgcgttgcgctgatccggcagcgccgtatagccataggtacccggatcgagaatgaacggcacaccgtcaaagcagacctcaaacgacaactggtcattatgcgcatggccgccattccccaattgcccgacggagccgcagcgcaacgacaaccagagcctcggacggcgatagacatacagaccgaaattgtcgaacgcacacaacgcatcgagcgcggtctctggctcgccgccctgtccttgcccaagggggcctgccagcgcctgtaagagtagtgcgtccagtgaagccggtggaggtcttggccccttgcgcaactgcgccacgcaatcgataaacaccgcatgtccatccttccagggcgcatcgtgtaacgcatcgggagtgagcttgaagaagcgcccgctatcgttgtcaccaacctgagcgactccgccgtctggtcgggtgatcccacgggaaaaatcagccattctgaccaagtgccgcagggcctcttctgaatgcagcgcgtgagccgcaggcacactgcgctgagccggcagcacgcctgggcccgaggcatccaggccgtcgtcgaggatagcggagttcagagcctgaagccgcgccgccacgcggcgcgccaatatagcgggaaacagcacgagttcagccgacagccggtggtagctggttgaagcttcgaaattgctgccatccgcctggaactgcacgaacatttccttacccaactcattggccgccagcatcaaccacgcatcagtctctgcgctgggcggcaggtaggccgcaacaaacagcaaaccagccaagttggccaggtaatggttgctgcgcaggtgggggaaccattccaggtgggtgactatatgacgaccgtgggccagtacactgcgcttgaattcgatgtcgaagtccggcgcgaaacgcatgccggcggctataaaaatatcgtgggccagcagtaggttggcgatacgaattcccacgtccatggtgcaggaccagttgacaccgaagcggggcgggttgcacgcaatgaaatccagcacctgatcctgaaactctagacgtagacgctcactcgccgcctgatctgcagccaactggtgggccgctgctgccagggccagccgtggcaaatgttgcatacgcgccagctcccagggcagcttgacgtcgacgccaagaatgtggccgtagcgaattagcgccgaaggcgtaaccggcgaccagcggtagcctgaacgcaggtcaaggtgccagtcgatggactggtagccgggcgaaatcaaacgctgcaagcgtgtcgcatggcgacggttggctggattgcttccttggattgccggcatgtcatagcggtgcccttccagtccggccgcacggaatcctgcaacgggctgtatgtcccaagcgccgagcaggtcgaagcggtgctccagtaagcgctcgctgtcggcagtcagtactgcacgccaaggctccagcatttgcgcagtgataggtggcagcagcgcttgcagaggctgctcgggaacatcgccgccaaatgtaggcaaaaaacggtcccgcgcctgcagcctgacttgcgcccagttgcgcagcgcataggcagtgacgcgacgagcaatctgcgcaggcggatggcgcagcagtcggcgaatccgggttggccaactcataaacagatgcgctcaagtgcgcatacgatccgctgcgtatggtgacgccaagtatgtttttccagcacttcctggcgtgcacgctcacccagggagcggccaaagtcaggctgctccaacacgtgagccaagccctcggccaacgcagcagcatggcccggctccactaaccaggcgctgctgccatgctgcagaacctcctggatctgaccgagtgccgatgccacgataggtcgccccatagccatgtattcgaacagttttgtgggtgaaccgaagaatggtgtgccatcaggattgggcacatgaggcgcgaccaataaatcacaacaggccaggtaacgaggtgcgtccttctgcggcacctggccagtaaatacgcattgcgaaagaacgccaagtcgcttgcaggcttccagcgttgcagcatggcgggcacccttccccatcagcaacagacgcagattctcatagtgttgcggctggctcgccagcagcagggaaaaggcctcgaccagttcctcggtgccatgccaaggtccgaaggtgccgataaaaccgatcaccgtcttgccctcaagggccagggtccgacgaaggtccgacgcatcgatgtctggatgaaaagccgtcgcatccacgccattgggattgaccagaattcgctcaacgggcacgccacgcccaatcaggtcctggtgcaggacatcgctgaccaccacgatcagatcggcggcttccaggttgagctgctcaacttgctcggacagtttcaggcgcgccactggcttaccccagtgctggctgatccagacttcggaaccgttgtactctgtcaccagcggtacattcagctccagtgccagcttggcgcctgcatagttgttcaagctatagcgctggtagataaacgaggggcgttcggcacctactaccgcgcttacctcggcgctggcggagcggctgaacaacaacgctggcaactcacggaaatcccagaaagccggggcgggcaaaagaatgcgcacggtgaggcaaggatcgacaataggattacccacggtggcgaacaccaacggcacaacacctgtgacatcgcccaagttgttgaccactccggccatgtgcgtgacagagccacccacttgggtcgagaaccataggtcggttttcaggtacaggcacggagcaccgggtttcggcgatgcggcgctgcgacgctgcgcacagccccgtagatgggccaattcacggttcacttctgcgagctcgcggggcaggcgcagcgcctcgccgagcgtagcgaacgcctgacgcagcagtgcaaggaagcccactttcagctgccgctggtgcgggtcgacgatcatcacactaccgtggctaagcagacgcagaaccaccatcaccagcagcgggcgcgggcgtagcccaagatgcgcaagcgtcagtgtcaccgatgtgtaacgcagtaagtggcggcgcattcccgggccacgcacagtggcagcaaaatcagcgtgtgaccacgtttcgacgtcggcaggcagttgcatgccctctggaggcccgccgtcacagatcagcaagtgccttaccatatcagcgcccaccccgcgcgttcggtgtgtcgatccagcggtcgtaccagcctgccaggttgtacagcacccacagattggtgccgtagtcgccacggccactgcggtgtgcctcgaacaactcgcgaatatagccggggttgaaccagccacgcttgaacagcgcgcactggttgatctcgtactctacacgacgaccgaactcacccttgagccaataggccaccggtgcgccgaagcccactttggtacggtcgatgacgcggtcgggaatcagcccgcgcacggcatccttgaacagtgatttggtgcggccgccttccagcttccagtgagcaggcatggcgtaggcggactccaccatacggtggtcaagaaaagggacgcgtgcctcaatcgaatgcgccatggtcatcttgtctacccgcatcagcagcagctcgggcagtctatagctgagttccagttgggtcatgcgccgcaattgctcgatatccccagctggcagcatggccgctgccgcagccattaccacgttactgtcggccacacgcagcaggctgtcatccagtggtccggaactgccgccaaagtcgatagcactcttgttgagcaaggcgcttttctggatttcccagaaggtcgcagcccccccaaagaagcattctttgtcactactggcacgaatcaggaagtccagcccagaggcgtgggacaaaccatcacgtcctgcttgtctggccaaccagccagccccgtggcgcatggctctggggagcatgcgatagggttgccagaagcgccggtgcaatttcagatatcgcagataaccgctgtaaccggcaaacaattcatcagccccctcacccaccagcacggccttgacctgacccgcagccaacttggagacatgataaagcggcacgcagacccaatcagccaacggctcatcctggtgataaaggatgtcggcccaggagtcttcaaacatgttccgggtcactgatacttcgtggtgctcggcgccaaagtgacgggccatatcacgggcatactcgcgctcgtccatttccggaaatccgtcgtagccgaccgaaaaggaatgcaccttgccgctcgcgtgcgccgccatgccagccagcagcgaactggaatccacgccaccggacagcaaaacacccaccgggacatcagccgccatatgctcgaccacagaggcgtcgaagctcgcacggatgctgcgcaccgcttcatcgcgggtagccggcagtgaagggggattgagcattggatgccagtagcgcttgaactccatgcggccaccgtcgacaagctgcagatagcaacctgctggcagcttctggataccacgaaacatcgtcatgggtgctggcgtgaccatgccactcaggtagtggtacatggcaattggatctatgtcccgtaccacgtcgggcacctgcaggatcgccttgatttcggaggcgaacagcaggcgaccatcgctggcgtgcaggtaaagcggcttgatgccgaccctgtcacgccccagatacaggacgcgctgcaaattatcccaaagtgcgattgcgaacatgcctcgcaggcgctgaagcaacccttcccatccccacgcccggtaaccctgcaccagcacctcggtatccgaatgtgcagtacggaaccgatgacccgcgacttcgagttcatggcgcaacgctacgtggttatagatctcaccattaaaggcaacgaccacggattgctcagcatccgacatcggctgcgtagaggcgtcgtcgagatcgacaatcgacaatcgccggtgccccagacccaggcgccgtgacgcgtcgatccacaagccagccgcgtcaggcccacggtgactcaggctgtcgcgcatgctgatcactaacgcgtcggaaaccgatcccctcccttgcgcaacaaacactccgctgattccgcacatggctcaggttctcgaaaacagcatcagaagcaatcggttcgcccctcgatccaggattcatgccaaagcacggcattgagtaccgtccagagatggaagctgtagccaccgcccgtgcccatctggtgcttgagcatgtctcggaagtagccgttgtcgaagaagccttcgcgtaccagacgcgaacgttcgaatgcggccatgcagcggcgaccgaagtcttcctgcttgaaccacgcctccatgggggcgccgaagccctgttttttgcggtagatcatgtcgtgatcgaggtaaggctccgcggcttttttcagcacatgcttgccgacgccgttacgcagtttgtggtgtggatgcagggtgcgggcgaactcgatgatgtcgtgatccagatacggtgtacgggcctcgatggagtgcgccatggtcagtttatcgacgcgcatcagcagatgctcgggaaggcgcagtttcatttccaggtagggaatcttttgcagaacatccggctgcaacagtttgcccttgatctgcgacatgtagtgttctaccactgcatggctgtcggtgctgcgatgggagtcgggcaaaagaccctcaaccgggcagtcgatctgactggaaaaaatgtccatgtttggcgtgagctgatcgcgcataccgccccaccagcacaccgcgcccccccagaacagttcctgaccagcgcgcgcgcgcttctggatttctttgtcttcagtggtcaccgctggcagaagtgccctgggttgggagacgaatcgtcgccaccaaggcatcccgccgccgggcagcgccgggttatacatgttcatcgctttatcgcgataatggtcgcaccaccagtaacccaagaagttctcgtccgcaccctctcccacctggacgacggtggtgccgttgtcacgcaccagcttcgacaagaagtacaggggaatgcagacgttgtcagcaatgggctcgtcttgcaggcgcaccatctcaggcaggaaatcctgcgcgtcgcggtgattgatcagcatctcgtgatgctcggtacgataacgcgcagccacccgctgggcatacttgaactcgttggtctcctcttcaccttcataaccaatcgagaaggtcttgatcggatcgctgcgcagctcactcataagcgccacgttaaggctggagtccacaccaccggaaagcaggacgccaaagggtacatccgagaccatgcggcgctcgatggactggcgcagcaatgacgtcatctcggccacggcctgttcatccgtacgctcgataatgtccgcagcgctgggtatgcagtcccagtacttgtgcgccttggctttaccgttcgcatcgatagtcatcagatgcccagccggcagcttgaagatgcccttgaacaaggtcagcggtgctggcgtcacgataaaggtcaggtagtgtgagaacgcggtctgatccatctgcggcgatactgcgggatggccgaacaacgcacggatctccgaagcgaacagccactcgcccgaacgggtgcgggtaaagtacagcggtttcttgccggcgcgatcgcgagccagatgcagcacgggcgcattgggattacgcgcgtcatagacggcgaaggcgaacatgccgtgaagtttctgcacacagtcgatgccccacacctcgtaggcacgcaatagcacctcggtatcggagtgatcggtgcgccaaacgaacggccgaatcgcggaaatctcacggcgtaacgcggcatggttatagatctcgccgttgaagctcagcaccaccgtggcatcttcgttcgccatcggctgcgtggcggccgtggacagatcgatgatggacagccggcgatgccccagcacacaacgctcataccgctcccgccagatccctgcgccatctggaccccgatgcagcatgcgatcacgcatattgatcaacgtccggtcatcgcacacttttgactgcgggttgaaagcgcccgtgattccacacattcgattattctcagcgttcgttgtggttgatgtcgtcttgctggcggccaaaaagccttccaagccggcgggacaaccgataagccaggttgcggctgatccgctgcaacctggccaacagaatggcgtgctcatctgctgctgccaccagcctcaggttcagttgctgtgcatggtcagcttgttcggccagcgcggcatcgcgtcggctcacctcttcttccagatgcgccaggccctgacgcagttcgacgatctcgcgttcgcgctcagcggcatgggccatttcctggttgattacctcggccatccgactcaattgctcactgcgtcgcagcaattcctgctgcgactcttgctgcagttcggtagcccgcttttgttgctcttgcgcacgaagcatttcgaggctcagcgcctccgcggcgttgccagcctctgcctggaggcgctgcacgtgctggttcagctcgatcatttgcgcagccgttccggattgcgccatgggttcggcctgggccagcagttcagcacggcgctgttgtgccatggcgcgacgatggggttctaacgcggcaccatcgcctttacgacaagcaacgacaaagagaatcggtgccgtcagcgagaaacgctcgagcaacgaaaccgccgggcctatggagttgagcagtgcgcgcgccgtaaccggcaattgctgcgattcgccacgtccaaccagcaggtcggcagctccacggtgtcggccaagcatgtaggaagcgagctccggcaggctcatcccatattgcccatccatatgcaacaactcgaaaccgcaacgctccagcaggtgacgaacctgcgcagcgccaaagaggttgatatgtcccggcgtgtcgtagccaccatgcaccacgctacaatcaccgcgctgagcacgcagcagtggtgaatcgagattaggaatggtgaaggccagcacgccattatcggccagcaacgggtggcaactcagcagcatctgcgcaggatcgaccatatgctccagtgactcccagaagctgatcagatcgaagacccccgttggcatctgggtatcatgcagtacctgcagcccggcatcttggcagatcttcaggcattcacgcgaagactcaacgcccaagccatcgaagccgtgctcacgggcggcaatcagggagttgcccaggccgcagcccatgtccaggtagcgcagcccttgccgtgggttgaacagcacactcaggcgtgtgaaatagtcattgaagcgagccaagtcggcctgctggttttcggcagacatacgcttgtgaaaggagcgctggaggactttctccgcctgcgggcaagcctggaagaaccgctcgaacaggcgagcatcgaccttcagcgggacgtgccagcagccgcactggccacactcttcatagccataaccatcataggactgaaagatcagccgctgatcgtgctccgtgccacaggccggacagccgcggcgttccaactcgactatcagcgggcggccctcacggttccaccattgcacagcctcgccccagtcggactgactcatagtgctgaagggtgtcccgatggtcatctgcggagcgctggtatcatcgtcctgcagggtggtcaggacaacgatcaggcgggcaaggtcgccagccaagtcaccggcggtctggtcaatcgacattaagtagtccgcctcgtgaaattcattcgccaattgtctccgccacgcccgcgcgcgctgcgtaaatcagcagttcacgctgggtcgggtcagccagcatggcctggtagttttccaggtcggtacccatcagttcagtcaagccatagatgctgtaattgaaggcctgcgactcaagcacgctgaagttggaggcctgcagcatccactcgatctcgtcggcggtatattcgcggtgatgcccctcaaacggcaattcggtggcgaactggctctggatcggggggtggaccgactgcccacgtgccagtttctggcggttgtagatataggccaggttgggcgtgtcgagcaccagcaggccatcggcgacaagcgagcggtgcagatcacgcagcagcaggcgcggagtatgcggcacatgctcgatcacacccatgagtaccacggcgtcatagctgctatccggctggaagtccgcgaagttctgcacccgcacgccttgctcgatcagcaatcgctggttgtcatcgaagcaagcgccgtagctgtcgtacgagtccagcgcggtcacctggtatccagcctgtgccagcatcagcgagcagttgccgaaataggcaccgaagtccagtacccgtgcacctggtggaacgtgctggcgcagcatgcgcaaggcacgaaccatgcggatcgaactgaggttgatgtagttggaccagttaaagcctttcaggcctggggaatgggtttccagaaccgagtaatccttgccgccgatgcaggccatgacctgctgcgcggcatggtcggcaatggcaaactctgttgcgaaatcacgctgtaactcgtcggtaaaattcagcttcatgctttgacctcattgatgatcaggcggcggctctcatgcaccaacacgtccagcccaatccatcgttcatcacgggcgtcgataatgttgcgtgccagccactgcgggttctccgccgcaaggttcgccatctgaatgctcctgctgcagaagtcgaacaaccacaatttcaggatgttggcggccctggctacgctgactcctcgcaggttgaacgcgccgacacacgcatcggtagcagcgtgttggcgccagcgaacttaccgccattacctttgatgttgaattcaacacctcggttcaaagcgaaatagacatcatcattgatagagaagaagcggccatcattgtcctcgaagtaaccggggcgaaccgcgaaaagcgtcagggtaaaggtccccagtcccagcctcaagcgagaacagtcaaaactgacctctccttccccatcggcgatgctgatttcgcccgcgctaaggcgagcgacatcggtaaccccgtcgcggtggatcgcgatgaggaactcaaccggtagcggcccggtacccggctcgacccgatacttggcgcgcacacagatgggctcgccggcatcgaagacgaaccgactgtcaccctccgcgccgcacagttcgactccctcgagccaaatacggcctgaaccatgtacgtcggactgtggagccaactgggacggcggtgcctgcatttcgcttcgactagtcggccatgtggacagctccccgaggagttgggcggcaacaagttccagctcggcgcgcatcgcgcatttatccttgaaccagagctcgcacaacagcgtattgtcttcgctggcggagtagtcgacttcgactctcagcgcgccttcgccagcctgctgaatctgctgctggctcaggtccaacaccaatcggcagcgcttgaccgcaccaccgtccgccaggatacgcagcccgctgcgcccggctaccgactcaaaaccagaggacggctggataagcgtacaaccttcctgcatggggtactcattgagcacctgctcaccatcaagcacacgcaccgtgcgcaccagtagctgcccacgcaagggcgcctggtcggccgtagacaattccagaacacacaggccggcctggcgcgtagccaaggccttggcgcgcaaacgtgcttcttcctggaggcgtaccgagtgttcataggcgcggattacttcatcgctacgcccatccatcaacacgctgccgcggtccatccagatcatgcggttacacaatttggatgccgaatacacatcatgggacaccagcagcaccgtggtgccgctctcctcagtcatttcccggatgcgctcaaagctcttgttggcgaagtaggcatcgcctacgccaagaatctcgtcgagaaccagcagctcaggggaaattgcggtcgaggtggcgaacatcaagcgcgccatcatgccgctggaataggtcttgaccggctgatcgatatattcctcaagctcggagaaggtgatgatttcctcaaccttgtgattggctttatccccagtcacagccaggtgcgccaggtaggccagcgcattctcacgacctgtgaaatcgggatggaaccccgtaccgatctgcaacagggcatgtgctccctggctcacctcgaaaaggcccacagtaggttgcgtcacccccgtgatcagtcgcagcagcgtgctcttgcccgcgccattgcgcccgataaaggccactttttcacccttgcggatggtcaggttgacgtcgcggatagcccagtgctcttgataggctccctcacggcgtagcatcccaatcatgtcgaggaaccggtagtgcggcttcgcataaagcttgtacagcttggacaggccttcggcgtggatgattacatcactcatagtccaccagcatgttcttgaagcgtctgaagaaggcacagcccagggcgaaggtgaccacgcagatcagtgcgtaccagcccaacacctccagattcacaggatgattagccagcagcacggtgcggaaggcctctgtcatgtagtaaaccggattgaggtagatcatggcctggaagccacctggcaccatttccggcttgaagccgatgggcgagataaacatcagcagcagcaaactcaggttgacgaagttagcgacgtcgggcagcgcaaccaccactgccgagaggacgaatacacagcccagcaggaacaaaacctgtagagcgatgaccacgggcagcagcaggaagcgccagctcatgttttcgtcacccagcaccagcaacgccacgatcaggatgctgaccacttggccggtcaacgcgaccagtaccgtgcgcaccgggatcaggtcaaccggcagcatcacgttcttgaccagatgcatattctgccgcagggaaaccgctccgctgttgagcgcctcgctcatgccgatataaggcaccagcccggcaaaaacatagagcgtgtagtcgaactcgctgagccctgggaaacgcattttgaacactaccagatagacgaacaggtagatgctcagcaacaacagagggttgatcaccagccatgccttgccgaaggccgaccccgaatagcgcttcgccagttccacgcgggttacggctgagagcacctggcgataggcccacatcatcgataacacacgccccgccgagcgcccgattcgcagaatcatcgcttgaatccccggaacagaagctccaccacgggttttctcagaacccccaccatccgagcggccaagcgccgcacaggatgacgatctgactgttgattgttactcacatactggacaatgctggcgtccgccagggtccgatcgaagaatggcccctgataaccgtaagccatcgggcagcgctggcagggtggcaacggcgtgtcagagttcaccgtgcggcggaattcacgcattttctcgccgttccaaatcgactggaaatcctgctcgaagatattgcccagcgcgtaatgctcctggctcggcccggtggtgatgcagcacacatccatgcggccatcgacggtgaagttgttgatatcggtccacggcttctggcagtagaaacgtaccttttccgggacttgcttgaccttgatgagcttggctttagtcggcgtgaccgtctgagcggaggtcgcctgcggctctccggcgacggcttccatctcgatcagttccgtgccttcacgctcgcgatccggggtatcttccagagcatcgccccaatcaatacgagccttcatcccctcatcgccgcgggagaacagcaccacctgcaaacgatggttttcagcggtatcgatgatcaagtcctgcgcatggctgccgggaccgaagctgaactggtgcgtccacttctggaagtcctcgctgagtacaccgatggccaacttacctgtttcgacgtcaacctttaccgggaagaccaagcggctgccgggtgcgcaagggttggagtaggacttgatcagatagcgtccattgaggttcggtcccgccacgatatccagtaaatgaccttgccaacgggcccgcacaccggggctatcgatctgccagcggcgcggaaacggcaacttgaacgccttgcggataccgaccccgggacgcatgacgcgaatgaagtcgatgtcggctacaaagcccgccgcaccggagaacaccaaggaaacctggagttcttcatccgtctcgaaggtcagagcaacctcctgttcatcctcgccggcctggatcacctggctggtcagaacatgtccagaacccgtgagcaccgagactaaaagaggggtgccctcaagtttcacgctagcccggaacagcagttgctgaccaggctccacgggtatgagcgcgctgcgccacgtgtagtcgccctcgccgccctcggggcagcgcaacaccgcacggttgagattccaggagacactcatggccgaatcgccgatatgccaatcatctcgacgcggtgccagcaggcgcccctcaaaaccggggggcatgatcaccctgtccacggggtcaggccggaccgagcggaaggtggccgggtcaatgcggatgtcgcaggagttgcgcgtgtagggaatctggcgccgcggcacgtcttccaggtattcccgtgcggcatcaagtgcatcgttgacctgggattcatacggcacgatgtcgcgcaggtcttctactgctcccaggtctgccccgagctcagacaatggccgaatcatgatgacgttgacgcgcagatcgtattcggcgaattgcaggaactgctgcagttcgtgaacgttggtggcatgcaccacgaacgacacgaacaaactgggggtgtcgctccaggcacgctggtcgacaatggcgcgaatactgttggtgacgcgatcgaactccttgatcttcatcacttcgcggtgggtctgggcggtagctgcattgagcgagaaggtgattgactgcaagctcagcagatgggggatctgctccggctcgatcaaagcgccgttagtgatcaggtacgacgaagcacctttcttctgcagcgtgaccaacagggagttgaactctcggtacagggtcggctccccgttgccttccacgccatacatgtaggcggtattgagtgtcggcgcgataaagcgctggaccttatcgaatggcaactgcttcttgatgatgccggtgcgtttaatcgtcaccgaacagaactcgcagagggcgttgcattgcccggtcgggcatagcgcaaggtacatcggcaggctaagactctcttcgcgccccagacgcatctccatgccggccacaaaggcattgaacaaccgagagctcttacagcgtcggtggacaaagcgcttgagaggtccccagtgcggcaggtaggtatcgacgtcgagaatactgtcgtcggccacatagggcgccgccaggatttcgaggccacccagcgtgaatgtgctgcctcggggataagcaccgaagtaattgaccagtgccaggcgataactgtcctgggcagcgggtgcataggaaaatgccagacgatgttcacccgtctgttccactgcccgttggcgcagccagtggtcaggatcaccggcactgccctggttctcagacttgatcaacaccagagccaagggagcggcatgatcgacatcgacctgcagttcaaaggtgtagagctgtcctttatgcaactgaaactcggaggacagcaactgggtattgagcggaccttcgtcgcagacccagtagccttctccctgagcctccaaaggctgcgcacaaaggttttgccaggagacatccggggcgatctggggttcgataaatcccgtacgcttcttgcgcccggattcacgcccaacattttcggtcacttcgacgagaggaatagtcttcatacatagagtccttcaggctcagcgttccatagcgcatttgcgctttcgcgagcatgtacagaggaagggccgcttggcgcggtaccgacgaatatcgcgcggcacaaagtggatgactgcgccacaatggctacggtgcgcaaacgcaccccatagccacttgaataccaagcctcttcaacgctccagatcagtgaggggggtgcctcgaatacggcaccgccatcggcgtaactcagtaccgcccggttggcctccaccgtaacctgcacactggggtgaaccaggaaatgccagcgcaatagatggttttgcgcattgcccagacgatcctcgacgatcaacgcaccgctgtcggccaggcagacccggcgctcatgcaagagctccggggccaggcgctggtaggacgaatgacgcccgatgataccgatgctgccgtgaccttgtttgggcatatcccactcaggttcgccttgctgcacgaggcgaaacaatgctttgggatccatcccgtgctgttcctggccatccacttgtaccgtgttgtgatgggcggtggagcggaaccagtttcgtgcgtccgggtcctgggtataggtgtaactgcctccatcgacgaacagcggctgatcgccgatggcccattcgatggcgagctggtcgttatgtttgtggttaccgatgccgaaggtaccacacaccgagttgctcattgcgacatagtgaccggcctgacgcagcactgcaacgccggcctgctcgaacaacattaccggtgtgggagccggcagttccgtgattgccgtcgccggatcccaagggtcgcgccagaacagcgcctcggcctgcccggctgcgtccagaggtttatcggatgtccgacagccaagcacaaccgagcctgcggccagcaagtggtccatatgctcctgctcggcttcccaacggtcgtaggccgagaagatatgcgcgcggccattatcagcgtcaccgatctgcggcagccggccgctgtcctggcgcaaggcactgacgaaatgcagcgctttgaccaagcgctcgcgatactcgcaagagaacggctgcctgtgatgctgggacagagcataggccgacaagaacatctcggtcacaaggcgatggtagggcacgctcgactcaaagccgccaccgtcttccagcaattgcagacgcacctgctgctcaagccccgcctccgcgataccacgccacacgcagccggcatccagcccggggaagttcatggccaaccagtacaggccgaacaggttcgccaggccatggttggaaacgatgatgcgcccttccagggtgccgaactccaggttggccgtgatatgccggccgtgttgcaccaggcttttgaggaagtgtctccaccagcgccggtctagctcgcctgagttctggaaaaaggacaggcccgcttgccaactgaccaaacgcagggccacgtccatcgggcaggcccaatgaacgccgagacccggtttgttgcgcgcgataaagtctgcaatcgtgcgggcgtaacagcgtgcgtatttttcatcaccggtcagccagtacgcctggcccagtgccggaaaatgctggcaccgcgtaagctcccaaggcccctttacatcagccgtgccacggcgcatgacgaaaggcgaccagcgccattggctgaataccgcgccatagcgttcgccggaaatagggtcgcgattccaatcgatatggtgccctgctccgcgcttaccccggcgcatgtccactgtcccgctgcccagcaagtcgaactcgccgcgtaccagccggtcagcctgggcaacgatgcgctcggcctcaccgggtatagcccggagttgctgcaccaccgaatcacggtcggacggcaggaagttacgcctgccgaaatcaccgcgacgctgacgaataaggtaagcgtagaaaccctgccagccatttcggcgcagtattgcggtcatctcgccgtccgcaggttggcgtgagaacaggtaacgcccccactcccagcagcgctcttgaatagattcaagcccgtgcaaccaggctttcaaacgctcacggtggggtgcagcgaccaagcgcaggcgatgcaaaagcgtgcgacgggcgaaacgaattcctctgccgatcacgatgtcaccttcagtgcggccgaacgctgcacagcgtggtgcaggattttgtgtacatgcttcttccaggtgtaattgtcgagcagagcctgacgcgcattggcccccagtgtcgaccacaagtccgggcgagcagccaggccggccacggcattgacgaagtcttcggtgtcacccggcttgcacagtatcgcgcgctggccgtcgagctggtcgaggcgggcctctgccaggtcctgggtgtcgaacgacggggtaagcacatcgccgatctgctccagcctactggctacaatagccccgccgagcgccatgtactcgaacaacttagtgggcgagccgaagaacttgctgtcaaccatgtggcggttgtgcggcgagatcaggatatcgctacaggacagcagcctggcagcgtcggtctgcgcaactgtacccggcataaagactcgatcctggaggtggtgacgcttgatggcatcgtccaccagatgacgaaagtttccgtcaccgataagcaggaaacgcaggttcgggtcgcgctcacacaataggggcagtgcctcggccagaacatcgattccgtgccagccgccgaaggtgccgataaaaccgaccacgcagttatcgggttcccaaccgaggcccacgcgcatctcgtgcttgagcgggctgtcgatgggcgcgtagtgatcgggcgagcagccattggggttgaagaggatcttctctggcgggatgccttgctggatcaagccatccttgatcacctgcgaaatggccacgatggtcgtggcctgggcgaaagccgcctgctcggccttggcgaaggtcgtttccaactcataaccacgctcatcgaagctgcgcttcatggagatttcagagccgttgtactcgaggatgtagggaatccccagttcacggctcagtcgcgcgcctacgtagctgcccaggatggaccgctcgtagatgtaggccggtttcagttcggccattcggtcacgcagccatcggtagaaaaagcgcgaggccttcagtacgtcgatctcgttacaggtcgaggacggcgtatccattatcacctgctcgatgcccatcgtatcgagcaggtcgaaacggttggccataaagcacactaggttctcagtacattcggccaactcctgagccacatagcaggtgtgtccgtagctaccaccggcggtaatattgacccagtagtcggtgcgcaggtacacaccggtgccggggatcttgttgtctgcgctgggtacaccgctgacggccagtggataaggcgaggcctcggcgatctgccgttcgatctcagcactgatggacgactccgagtcgcccagcagacgcgccaggtccgcaggcatccactcgaccaaaacggcgctcacatccagcgatgaggggccgccctgagcattactgaacaccagggtcaaactctcggagccacctgggtcgatcacaaagcgctcggtgaagtgccctttggaaagggggtagttgccaagccaggtggactcgtcggcattcaggcagccgaccgccatggcaccggtcgtcagctcaccggaaatcgataacaccgccatctgacctggccgagccgcaatcaccctcgaacgcagttgataaccccagtcggaatcatcgctttccagatggaagccttcctctcgcagggtaaaggcacgggcagccagcgcgctccatccgaactgttgcaagcgctctatgcgggccacgcgcacggcgtgcagagcacgagaggcataacgccgcaggacgcgagccacacgtagcggcaactgtatgattggcagattgcgcacgactattattctcccgaaaacgccattttgtgagtcttgaataccttgaccagcgcttcccgcgtcatcggattggcaccgataaaccagatcacgccttttttaaacaaatccagccacatatcccagccccagtcttgctgcctgagcatcaagcgtacctggccgaccctgcagcacagttgccgcccgcccacaggctcgcagtacccgctcgcgtaatctctggagacaggcccatggccggaatctcctgcctgatgcgcgtcatcatctgcgtatcggcggtgcactgcggacaggacgtcaggcttatctcttcaatctggtaggcgtagggttgatcggcatagatgagtaattcgacgcgggagccggccgcaaccgtgatggataaggtgccatcgggcatgcggaagtaggtaggcacaccagtgtcgatggtcaaccgcccgctcacgggctgtttcccttgctggcgccccaccattcgcagtttttggggcccctgctgcgtggcatcgaccaccagccctagccccgcggggttgagattgccgctgatctgcagcattccacgatgcagcgtaaggccgggtgcctggtaaggctgcacaatcaaaccattgtcggggccgaagaactggtcgagggcaacctgcccatgctcatcaaacagggttgagcgcgtcactgccagcgttgccaggccgaccacagccaaggcaataatgcccggcagcagcggacgcagcggacgcagcggacgcaagtcaatagcgggcagtcgtggcatgcgccaagggccttcgagtactcccaagcgcgagcgcagacccagacacggcgactcgacccatgcccaggaggccgcggccaggataaaggcgaacagcaacgacgcccacgccatccacgcttcaccggtgataccagcactgtaaagcgccagcggcaacggcatatggaacagatagagaccgtaagacaggtcacgtccacgcatccatgtcgacaactgcggccaagagtgagcaaacgccagcacaaacccagccagcagcatggcacgcagcgcaatcactggatcaggaactcggtagtcgagcgtagtagcgccggttttcacgtagtaagcaaggttgatcgaagcaaacaccagcatccaccaagacgcgcgcccaacgaaaaaaaaccgcagccgctgccaatagttcgccaccgtggccccggccaggaacatccagaagtaaggtgctgggtttgaaaggagcatgccggtcaggttggaactgggatcgctgcgcagcattgggccaaacttcatagcggccgctaaggataaggcgaagcacagcacgataagcaaaggcgtcaaccgcaaacgcgccagagtcttggagaaaaccagcggcaccagtagatagaagcccaactcaaccggaattgtccacagcacatcgctggggtagccgttgtacaggccgtcccaggtaaaggggccgtagttggtgaccaggttggcccagaagttggagcctaaaaacatcgccgacagcagccacttccagaacatcggatccaccagcgtcgccagggcaaagccgccggtgcaggccatcagcacgatcaccaacagatactgcaaccacagcgctgggtaaatacgcagggcacgactaccgaaataggtcaacagcccgcgctgccgattgacataggagcgcgtgatcagaaatccgcttaccacgaagaataccggcactcccggaaagcacttgagcaacccctccacctcacgcggcaacggcacctgcagccaccaaaagatgtgtgaaaatgccacctgcaaggccgcgagtaagcggatcagatcgaagttattgcgctgctccttagcgtccatgcctgtcagtcgtccacctgaacgaccgcgagaccagtgagcagctcctcgacccgtagcgccacggcagtggtctcgacgatctcgtcgaagggaatcggagccgggcccccgcttgccagcgcttgcgccagcagcttcatctgcgtggcctggcctttatcggcctcggtagcagaccagagcacctcgccggtgctggccttgatcagttgcttgaagtcgtcaacgacataagcctcgccatcacagaacacttcgatacgctccttgggcagtccctgcttgggaccgagcgccgtatagaacagattacccatgctgccgtcggcatagccgatcgtggcgctgaagttgtcagaggccagataaggcagcccgcccgggttgatgccagtggcactgatcgacgtgacgggcgcaccggacagcgaacggaacacatcgtacatatggcaggcttcgccaatattacgtccgccaccctgctcagtctggatccagtggtccagcggaatatagccaccgttaaggcggtagttgatcgccaagggggccgtgcgcccggaaagagcttcacgcagggcctggagggctggcgaaaagcgacggttgaaacccaccataagcaacggtggatcgaccagggcgtcatggcactgcgtcagttcgtcaagttcgtcccaggtgatcgcaatcggtttctcgacgaacacatgtttgcccgccttgagccctgcaatggcctgagccgcatgttcgcaatggcgcgtggcgatcaccagcatatggacatcaggatcgtcgatggcagcgctcagattggaggagaagacgccgagccggcgttcgcgtacgaagttgccaccacgcaccgcatcgcggctgaccacaccgcgtagaaaaatattgtccagacggtcgagcatgggcaccaacatcgactggccatacgcgccagcgcctaccaacaggtagttgatcttgcccacctgcgggctgcgggcaccgcgcagttggatacgctcggcctcggcaggttccaccatggcaacatccgcccgggtgtaatcgagcagcacgccaataggcggttctagactgtttgccaaggtcttgtagagcgccggagcgtcacccaccggcgctacgatatccacaagcgattccacatccaggcgcctggctgcgatcagctccatgtagctctgcatattacgattgagcgtccagcgcacataagaaatagggtaatcgttgcccttttcctcataattcgcgtcataccgcccaggtccgtaggacgtgctcatcagcaggtcgatttccttgcgatagaaatgcgcacgctgcacgttgaggccaacatcaccgacgatgaccaccacaccgcgtcggcgagtgatctccatagcggtattgatcacgctgtcggacttggtcgccgcagtgatcaaggtgcggtcacaacccagcccggcagtgatgtcgcgaaccagacgagggaactccgcggcattcgaagtaccgtgctccatgcccagcccatgggcacgttgcacacgcttggggtcgagatcgaatccaatcacctgacaacccgcagcgcgcagcaattgcacggtcagcagaccgagcagacccagtccgaccaccgcgattttttcacccagatcaggctgggcgcgacgtacaccctgcattgcaatcgtgccgatggtggcagacgcagcccagcgcatatcgcagccatccggaaccaggcaaaccaaattgcgcggtaccaacacataatcggcatggttggcacgcccggcaccaccacaagcgacacggtcgccgaccttcagtccctgcacaccagcgccaagcgccaccacgacccccgccgccgagtagcccaggttccagccggtttcatccatttcattgtgcggatcaccccctgggttaggcgctaccaacactacatgcagccgttcgaaatcagccttggtaacgccgccttgggcattggagatcaccagcttagcggcctcctcgccctgtgggtcgaagatcaatcgatcatccagcgcgccgggcgtcagggtgcggttccccagccatttgttgccactctcgtcgaggataccaatggcaagcttgccgctgtcgatggaaccgcgaagctccactgcaacctgatagcccacaggaatccgaaagactgcggtgtgtgcctggtactgccagtcagaatcatccgtcaccagcgacaagcgcgcattgtcgataacaaactcgctggcagcatcacgctgccaagccaacgcacccaactcttgatccggaagacgcagcttgggcgactctgggatcagccgggcaatctgattcttggcgatacgtttgagccttgaggcagccaggcgagggtccgcgatggctttgaccagataacgaccagcacggctggtgatctcccgagcctgatccaggcctgtcgacgcctcgcttgaggctgccggacgcaggccggccacttcagtgcccacgctaatcattgaatactggacctgaaccaggaccgcgccgggctcaacgccaggtgcaggcatccgtgcaatgcgtacgcgatcacttgccaaaaggacttgcctcataactctctcttatcctgagcacctgcatgaacatattcactgataccgacactgcccaaggctattcatgccaagaccttcatatcagcatcaggactgcagttgcttttctatcgtcaaagcaagccgcgttgtcgcaagctggctcatgatgtttttttcgtccagcgccccggtattaatggcatccaccagcgccaagagctcttcatgctgacctttttgcggcgcaactgatgcccaatgctttgaactgtcgcccgccacggtgaccgcccggtaatcatccaggctcaaaaccttcccatccgtgtagatatccatgcgctctttcggatggctgggtgaacccagagaagtatataaaagggtggccacggacccgtcgctgtagcgaatggtcgcgctgaagttttcgttgcgtcgaatgccgccggcgctgccgccaatagcagtggcctctaccattaccggctcggcatctgtcagaaaggcaaacaggtcatagatatggcaggcctcaccgatgtttcgtcctcccccttcaggcccatgcacccaatgatccggcggcaggtaaccggcattcatccggtaggaaatcatcagcggcgcgacacgttctttcagcatcgctttaatacaggcaataccgggggcgtaacgacgattaaaacccgtcatcagcaacggctttggcccgacattggtaccgctgtagaacgcttcaacggcatccaactcttcttcatgcagcgccaagggtttctcaaccagcacgtgcttgccagcttccagcgcctccttgaccagcgctgcatgcagatgatgacgcgtggcaatcaacacgaggtccacatccgggtcggccagagcctcacggtaatcggtgccgacaaagctggcaccaaactgcatggccgcggcctttgcgctactaccagtgcggctgaccacccagcgtatctcataacgctcgcgcaatttgatcagattgggcagatgcacgccctgggcaaacccaccggcaccaatcacggcaacccgtaccatgccctggttagcgacgggcgggcgcagcatcaggctccgggtctgctccaaatgcccgtcattcgggtaacgcaacagggccaacagcggccgatcatttccttgaaccaggcgcacgtacagcgcctcggcgtccgccagatcgaccacctcaggaagcaacgcctgtaagtccaccgcgccctgtgccagcagctcaagaaaggccgccatattgcggttttccgtccagcgcacgtaggcctgcggatagtcctgaccaccttcttcgtagtgagggtcgtagcgccccggtccgtaggaggttgaaataaagaaatcgagttccttgcggtagaagtcttcgcgcttgatatccagtccgacatcgcccaccagcacaacacggcctttcttgcggcaagcacgcatggctaagctgatcagctcactactggcggaggccgccgtaacgaccaccgcgtccgcgccgaggccttcggtcatccaggtcacccgggcgacctgatcgtcctgagtgggattgatgcccagatccataccgcactgtctcgcaatatccagacggcgcacgtccggatcaaccccgataacacggcagccattggccttgaacagctgcaccgccagttgcccgagcacacccaatccaaccacgacgatagtctcaccgagcgtcggtgctgttctgcgcacaccttgcatggcaatagcgcctagagtcaccgtggcggcttgttggggagccagtccctgcggcaccagcacggccagattgaccgggacgttgatgatttctgcgtgattagcaataccagcaccggcgcaggcaacccgatcgccgaccttgaagccgtcgacctgctcgcccaccgcaaccaccaccccggcggccgaatagcccgtcggctgccccgccgccaaagtgccgcgtatctgcgcaacggtgcgcgaaagcccctgctcgcggaccatatcgaaggcacgcttgattttttcaggatgcttcaaagcgcgcttatacagcggctctgcggccgacaccacgctggcggcttctgtccccacacttacgcaggagaactctacgcgcacaagaatgtgccggctcccaaccaagggagcaggaacctcttccagtcgtgcagcaccctgccttagcagcagttgcttcaacgccaagctccccgggtatcgattatcaccttgccttcaagcaacgtgcgatcaatggtcaggaactgcttgtggttgaccagcagcagaacgatgtctgcatcagcgatggcatcttcggcctgcataaactcgacgttgcggtacttgctcagcgccgccggcaacgactcgacatggggttcgacaacgcagataaggccatcgatctcatgggccagatgggcagcaatttccaacgcagggctttctcgcaggtcatcaatgtccggtttgaaagacaacccgaggcaggcgaccttgggattgaccaagtccttggcagccgccttgacttgctctatcacccagcgcggcttgccgtcgttgaccaagcgcgccgtacggataagctttgcaaggtctggcgtctgctcgacgataaaccaggggtccaccgcaatgcagtgcccgcctacaccggggccaggctggagaatgttaacccgtggatggcagttggctaattcgatcagttcccacacatcgatgcgctgccgatcacaaatcaacgacagttcgttggcaaaggcgatattgacgtcacgaaaggcattttcagtcagcttaaccatttcagcggtgcgtgcactggtggtcaggcaattgccttcgacgaagatccggtaaaaggcggcagcctgctccgcgcacttgggcgtcatgccgccgatgatgcggtcattgctcaccagctcatgaatgatccgacccggcagaacgcgctcggggcagtaggcgaggcggatatccgacttctcactcgcatcgcagggaaaactcaggtccggccgcctagcccgcagccactgctctagcttctcggtcgtacccactggcgacgtggactccagaatcaccaaatcgccttttttcaggactggcgcgatatttttcgcggccgcttcgatatagctgaggtcggcctggtaatcatccttgaacggtgtaggcaccgccaccataaatatgtcggcagattccggttgcagcgaggcgcggaagcgtcccgacgccaccgcaccggaaagcagcacatccagttctgcctcaacgatatgaatcttgcccgagttcaatgtcgccacaacggacggattgacatcgacgcccagaacctcacatccacgactggcaataagggccgccgttggcaacccgatgtaccccagtcctatcattgacacacgcttgtattggatcatcccaatattccctgcacgatccgcttggcggccaagccgtccccataagggtttccggcattagccatggtttggtactcagtttcgctatcgagcaggcgcaacgtctcgaatacgatttttccggtatccgtgccaaccagccggacagccccgacatccagcccctcagggcgctcagtggtgtcgcgcatcagcagcaccggcttgccgagcgagggtgcctcctcctggatgccgcccgagtcagtgagaatcaggtggcagcgcttcatcagatagacaaagggcaggtagtccagtggcgcaattagatgtacacgtgggcagtcgccgaggatacggccgaccggctcttgcacattcgggttaaggtgtactggatagaccacttccacatcattctggccagccagctcgcgcagtgctaagcaaatgttctcgaacccttggccgaagctttcgcggcgatggccggtgaccaggatcaacttgcgaccagcgtcgagaaaactgaattgctcctcgaactgcttggtcagagcatcgtccatctcaatgcgctgcacgacgtcgagcaaggcgtcgactacagtattaccggtgacgcatatgctggtatcggcaatgccttcgcgcagaaggttagctcgcgccgcctcggtgggggcgaaatgatgtatggcaattgtgctggtcaaacgccggttgatttcctcgggccacggagaatatatgtttcccgtacgcaggcccgcctctacatgacccactgggacacgctggtaataagctgccagactgacggcaaaggtagtggcggtatcaccatgcaccaaaacaagatcaggcttctcagcttcgagtaccggcccgatgccatgcatgattcgcgtggtgatatcggtcaagctctgccctggacgcatgatgtcgaggtcgtgatctggcactataccgaacacacccaatacttgatccagcatctctcgttgctgggcagtgacgcacacgcgacagtcgatcaaggcctcttcctgaagccgctttacgacaggagccattttgatggcttctggtcgtgtgccaaaaacacacagtatcttcatccccccaaaatccttctgaagtttgaaaaagcggtggatatcccgcccatttgcgttatttcttctaacccgtatgacgggagaagcggactcaactacagataagcatattactgaatagtcgcgtcttttctatgaaaaatatcaaaatacttaaaaacttcatgaaacacccctctcacacgagccgaacggttaagccccgatgaaaaaatgtcccacgccgatgcctagcatgcccgcgaacgttagcagacctgcctcgtacacatccgatcgacttgggccagttcactatctgaatagctttgagcacccgaaaattggagatggtcgtccagcgtacctgttgatgcccatgttgcgggttcaactgatgcagaactgtttcggttgcagcgagccaacgatggaaaaagcagtcaaagaaaccaccactctatactagaagagttgtccgggctgcacttggatcgtattccagacggaacgatcattcccattttccggcgcttgttggaaacacacaagttttagagcggacctgacaattaatcaatggccatctggacgaccgaagctttctgctttaccaaggcacgacggttaatgtaataatcattaattcaattaattcaattaattcaaaaaaacaagaaaaagaacacactccccagcaatacaaccttactgtaggatacgctttatttgtatttttatagaaacttaaccattgaaaaatacttttaaaaacagattaaaacataaactattgacgattgtataaatcctcaaatcgaacgatatcatcttcacccaaataagagccagattgcacttcaatgatttcaagaggaatgacaccagggttttccagcgtatgagtttgccctactggaatataagttgattgattctccgtcaccaagtaggttttatcaccattagtgactttcgccgtaccactgaccacgacccaatgctcagctcgatgatgatgcatttgcaatgacagttttgcgccagaattaacagtaattctttttacttgataacgtctgccgctatgaatcgaatcgtagaccccccaagggcgacagacttctctattatcaacagattcgccacggccatcgtcttttagtttatcgacgattttccttacattctgcacctgacttttatgcgcaaccagaactgcatctttagtttccacaattaccaggtcgtttacccctaacgtgctgaccaaacggctttgtgagtagacaaatgtattatttgtctgctcaatcaaaacatcgccatgacaaacatttcccagaatatctttatctccaatctcccatagcgacgcccaagacccgatgtcgctccatcctgcgtcaagagtaactacaactgcatcaacggttttctccataatcgcacaatcgatagactctgcagagcaacttgcaaaagcttcacgtccaacacgagtaaaatgcatatcctgctcactgtctgcgagtgcgctacggcaagatgccaagatatctgggcgaaatttctccaactcttccagataacggcttgcacggaacataaatataccgctattccatagataattaccgctcgcaaaataggaacatgcagtttcttcatccggcttttctacaaatcgggccacgttgaaggtgtccacactcagactatcacccctctcgatgtatccgtagcctgtttctgcctgcgtcggaacaactccaaaagtaacgagttttccatcaagtgccaatggcaatgcctttcgtatagccgaatggaacgcagcagtattttttatcaggtggtccgcggccagaatgagcaataccggctcctgctcttcacgagaggcctgcagagcagccaaggccactgcgggagctgtgttgcggcccactggctcaagcaaaatattggtatttcccaacccgagacgcctaagttgctccgcggcgagaaagcgatgctcttcgttgcagataaggcgcggtgatgctaagtcaagaccatccagacgcttgatagtcgcctgtagcatggataactctccatcggccaggcaaagaaactgcttaggattgagctgacgagaaagcggccaaaggcgagagccagaacctccagccataattacaggtattaacatttaatcgtcccttgaattcaatgcgttttcgaactggctaaaggctatatagcgataccaccttttttgccaccgactcataattttagaaacttccttcattcacctgcccactcatatcagaacagtaacccgcagaaagctttctgtgcagcttgcccatagcctctttcaaagagtccgtatcaatacgaaaaagtagattacctagtctccgcagacctgagcataaaccggatcctggcagattattggacaccacgaatactaccttcataaacgaaagccccatccggccaagcagtcagagcacagcaacacaggttcgcattgttagcctgaagtgcacgccgccgtcaattttggcgagcggctgcgcatcgatatctcgatgcccgatccgccgcaggcgttttggtagacatatagtggccgttcaacttggccgattggatccaactcttcagagccgccgcactttgaatcgcccggatcctctaggcagcttgcaagctcattcagcgagatcgcaagccaaaatcgaacatatgatggaagcaatgaaaaagaaaaggcccctgaaatcaggggccttaggcagtcagtgtgtcaaactctattgcctgaaaccacgtcgagcctccaggatacggcgcattactccaccgtcaccgacttcgccaggttacgcggctggtccacatcggtgcctttaagcacggccacgtagtacgacagcaattgaagcgggatggtgtagagaatcggcgacagggtgtcgtggatatgcggcatgttgatgacatgggtgccttcaccgttggtcatgccggctttttcgtcggcgaacaccaccagttggccgccacgggcgcggacttcctgcaggttggacttgagcttctccagcagttcgttgttcggcgccacggtgaccacgggcatgtcgtcatccaccagggccaatgggccgtgtttgagttcgccggccgggtaggcttcggcgtggatgtacgagatttccttgagcttgagcgagccctccatcgccaccgggtattgcgcaccacggccgaggaacagggtgtggttcttgtcggcgaacagttcggcgactttttccacggtgctgtccatggccagggcttcgcccaggcgggtcggcagacggcgcagttcttcgaccagggtggcttcgacgccttcggcgagggtgccgcgaacctggccaagggacagggtcagcaacagcaggccaaccagctgggtggtgaaggctttggtggacgccacgccgatttcgcgaccggcctgggtcagcagggtcaggtcggactcacgcaccagcgaactgatgctgacgttgcagatggccaggctggcgaggaagcccagttctttggcgttgcgcagcgcggccagggtgtcggcggtttcaccggactgggagatagtcacgaacagtgtgtcgggctgcaccaccactttgcgatagcggaactcgctggcgacttccacctgacaggggatgccagccagttcttcgagccagtaacgtgcaaccatgccggcgtggtagctggtgccgcaggcgacgatctgcacgttgcgcactttggcgaacaattcggcagcttgtgggccgaaggcgttgaccagcacctggttctggctcaggcgaccttcgagggtacgctgcaccacggaaggctgttcgtggatttccttgagcatgaagtggcggtattcacccttgtcggcggcttcggcaccgtcgcggtattgcacggcttcgcgctcgacggattgaccgttgacgtcccagatctgcacgctttcacggcggatgtcagcaatatcgccttcttccaggtacatgaagcggtcggtgacctggcgcagggccagttggtcggaggcgaggaagttctcgcccaggcccaggccgatcaccaacgggctgccactgcgggcggcaaccacgcggtcgggctggctggcgctgaccacggccaggccataggcgccgtgcagttccttgaccgtggctttgagcgcaacagtcaggtcgcccaggtctttgagcttgtggttgagcaggtgggcgatgacttcggtgtcggtgtccgaggtaaatacgtagcccaggcccttgagttgttcgcgcaatacttcgtggttttcgatgatgccgttgtgcaccaccgcgagatcgccggagaagtgtgggtgggcgttgcgctcgcacggcgcaccgtgggtggcccaacgggtgtgggcaatccctaagcgccctaccagcggctcgccggcaagggcctgctccaactcgctgaccttacccgggcggcgcatgcgctcaagcttgccggcgttagtgaaaacggccacaccggcgctgtcgtagccccggtattccaggcgcttgaggccttcaagcaggatgggggtgatgttgcgttcagcgactgcgcctacgatgccacacatggtgtttctcctagatgattgccgcgcatatcagcgtaatgccgcgggcttggatctggtcgcgggcctcgagcggcaggcgatcatcggtgataagggtatggacgctgctccagggcagttccaggttgggaatcttgcggccgatcttgtcggattcgaccatcaccaccacttcccgggcgacctcggccatgacgcggctcagccccagcagttcgttgaaagtggtggtgccgcgctccaggtcgatgccatcggcaccaatgaagagctggtcgaaatcgtaggagcgcagcacttgctcggcgacctggccctggaacgagtccgaatgcgggtcccaggtgccgccggtcatcagcagcaccggctcgtgttccagttcgctcaaggcgctggccacatgcagggaattggtcatcaccaccagcccgggctggtggcccagttcgggaatcatcgcggcagtggtgctgccgctgtcgatgatgatgcgggcgtgctcgcgcaggcgcatcacggcggcacgggcgatggcgcgcttgtacaccgagacgggttgagtggcgtcgcccaccagttcctggggcatggtgatggcgccaccgtagcgacgcagcagcaggccgttgctctccagggcagccaggtctttacggatcgtaacttccgacgtttcgaaacgcttggccaactcgtccacgctgacttcgccctgttcattgagcaaggtcaggatgttgtggcgccgttggggtgtatttcgtttcgacatggtgatggtaagtttcgtttcgaaagataacgaaggcaatcaaaacctattggcgaaagatcgtcaagcgggacgcagcaaatttttatgcgacacagagcaagtgtgggagggggcttccccccgattgaggtctatcagctacaaagatgttggctaatagtctgcaatcgggggcaagccccctcccacattgaataccttccgctgaggaggctgtggataactcaggtctttttgattttgaccggacgtttccaaccgtcgatgttgcgctggcgggcacgggcgacagccagttgagacttatccacatcctggttgatggttgagccggctgcagtgctggcgccatcgtcgagggtaaccggggccaccaacgaattattcgaaccgataaacacgtccgccccaatggtggtctggtgcttgttggcgccatcgtagttacacgtgatggtgccggcgccgatgttggtgcgcgcacctacggtggcgtcacccaagtaggtcaggtggccgactttggcttcggcgtccaacttggcatttttcagttcaacaaagttacccacatgagccttggctcccagcacgctacccggacgcaaccgcgcaaacgggcccgcatcactgccctcgcccatcacggcaccatcgatatggctgttggccttgatcaccacgcccttgcgcaaggtgctgtccttgatcacgcagttcgggccgatcaccacgtcatcttcgatgaccacacggccttcgaggatcacgttgatgtcgatcagcacgtcgcggcccacgatgacctcaccgcgtacatcgaagcgtgccgggtcgcgcagggtcacgccctgggccatcaggcggcggccttcgcgcagttggtaatgacgttcaagctctgcaagctgcttgcggtcgtttgcaccctgcacttccatcgggtcgtggggttgctcggtggcgaccagcaggccatcactcacagccatctcaatgacgtcagtgaggtagtactcgccctgggcgttgttgttggacagacgactcatccagtcggcgagcttattggcagggaccgcgagaatgccggtattgccttcggtaatggcgcgctgggcttcgctggcatccttgtgctcaacaatggccgcgaccttgccatcggcgttgcgcacaatgcgcccgtagccggtggggtcgtccagctcaacggtcagcaggcccatctggcctgggactacatgcttgagcaggcgttgcagcgtttcgacttcgatcagcggcacgtcgccgtagaggatcagcacagtatccgcggtgataaacggcacggcctgcgcggtggcgtggccggtaccgagttgtttgtcttgaagaacgaaattcaagtcgtctgcggcgagacgttcacgcaccgcatcggcaccgtgaccgatcaccacgtgaatgcgctgggggtcgagctgtcgggcgctgtggataacatgacccagcatggaattgccggcaaccgggtgcagcaccttgggcagggccgaacgcatgcgggtgccctggcctgcggcgagaatgacgatttcaagagacatgagtggctaccaatcctgggcggtccggcttcagaccagagaagtgttttgcaaaaaaagaaaaagggtagccgaggctaccctttttaatcaatcgcgcatgaaacaagaaggcgtggccgcttacttcttgcgcaactgctggagcgtgcgcagctgggctgcagcctcggccaaacgtacagcagcagcgctgtagtcgaagtccgcacccttttcgttcagggccttctcggcagccttgacggcttcctgagcggaggcttcatccaggtcgccagcacgttgcacggtgtcggcaagtaccttgaccatgttcggctgaacctcgaggaaaccaccagagatgtaaaacacctccttttccccgccctgcttggtcagcgtgatcggacctggcttcaagctggtgatcaacggcgcgtgacccatggcaataccaaggtcaccgagttcgccgtgtgcaatcaccatctctaccagaccggagaagatttccccttccgcgctgacgatatcgcaatggactgtcatagccatctgattgcctcaacctgatgagcgcccgtttccgggcgcctggattacagtttcttggctttctcgatcgcttcttcgatgccgccgaccatgtagaacgcttgttctggcaggtggtcgtagtcaccgttgaggatgcctttgaagccagcaatggtgtctttcagggaaacgtatttacccgatgcaccggtgaagacttcagccacgaagaacggctgcgacaagaagcgctggatcttacgagcgcgggataccaactgcttgtcggtttccgacagctcgtccatacccaggatcgcaatgatgtccttcagttctttgtaacgctgcagcacgtactgaacgccgcgagcggtgtcgtagtgctcctggccgatcacgttcgggtccagctggcgcgaagtcgagtcgagtggatcgaccgctgggtagatacccagggaagcgatgtcacgggacagtacgacggtggcgtccaagtgggcgaaggtggtcgctggcgacgggtcggtcaagtcatccgcaggtacgtataccgcttggatcgaagtgatcgaaccttccttggtcgaagtgatacgttcttgcagaacgcccatctcttcagccagggtcggctggtaacctactgcagaaggcatacggcccagcagtgcggatacttcggtaccggccagggtgtaacggtagatgttgtcgacgaacagcagaacgtcgttaccttcgtcacggaacttctcggccatggtcaggccagtcagtgctacgcgcagacggtttcccggcggctcgttcatctgaccgtaaaccagtgccactttgtccagaacgttggagtccttcatctcgtggtagaagtcattaccctcacgagtacgctcacccacaccggcgaacacggaataaccgctgtgctcgatggcgatgttacggatcagttccatcatgtttacggtcttgcctacaccggcaccaccgaacagaccgactttaccgcccttggcgaacgggcaaaccaggtcgataaccttgatgccggtttccagcaggtcgttgccgccagcttgttcggcgaacgaaggtgctggacggtgaatgccccagcgctcttcggtgtcgatcgggccagcttcgtcaatcgggttgcccagtacgtccatgatccggcccagggtcgctttaccgaccggtacggagatggcagcgccagtgtcgacaacgtccagaccgcgcttcaagccttcggtggaacccatcgcaatggtacgaactacgccgtcgcccagctgctgctgaacttccagagtagtttccgcgccttgtactttcagcgcgttgtagatgctcggtacgctgtcgcgtggaaattccacgtcgataacggcgccgatgatttgaacgatacgtccgctactcatagctggatcctctgaatatttgaaccgttaaaccgcggcagcgccgccgacgatttccgagatctcttgggtgatcgcagcctgacgcgccttgttgtagatcagctgcaaatcgctgatcagatcaccggcgttatcggtagcgtttttcatcgcgatcatccgcgccgcttgttcagctgcgttgttctcgaccaccgcctggtacacctgcgactccacgtagcgcaccatcaagccgtcaagcagctctttggcgtctggttcgtagaggtagtcccagtggtgcttgagttcctgatccggggtcgccaccagtggaatcaactgctccacggttggctgctgggtcatggtgttgatgaacttgttggataccacggacaggcggtcaatccggccttccaggtacgcatccagcatcaccttcacactgccgatcaaatcattgatcgacggctcttcacccaggtggctgatagctgcaacgacgttaccgccgaagttgcggaaaaaggccgcacccttgctaccaacgacacacagatcgatctcgacgccgttttcgcggtttaccgccatgtccttgaccagggccttgaacaggttggtattcagaccaccgcacaaaccacggtcactgctcacaaccacataacccacacgcttgactgcgcggtcgatcatgaacgggtggcggtattccgggttggcgttggccagatgcccaattacctggcggatacgctccgcataaggacggctagcagccatgcgcatttgtgccttgcgcattttgctgaccgccactttttccatggcgctggtaattttttgcgtgcttttgatgctcgcaatcttactgcgaatctcttttgcgcctgccatgtaacacctatcaggttagcaagcgggagccttgcggctcccgctgcggcttaccaggtttgggtggccttgaacttctcgataccggctttcatgccagcgtcgatatcgtcattgaagtcacccttcacgttgatcttcgccatcaattcggcgtgatcgcggttgaagtaagcaatcagcgcttgttcaaagctgccgaccttggcgatttcaacgtcggtcaggaacccacgctcagcggcatacagcgacaacgccatgtcagcgatcgacattggggcgtattgcttctgcttcatcagctcggtaacgcgctgaccatgctcaagttgcttacgggtcgcttcgtccaggtcagaagcgaactgggcaaatgccgccagttcacggtactgagccagagcggtacggataccaccggacagcttcttgatgatcttggtctgagcggcaccacccacacgggataccgaaacaccggcgttcactgcggggcggatgcccgagttgaacatggccgattccaggaagatctgaccgtcggtgatggaaatcacgttggtcggaacgaacgcggaaacgtcgccagcctgggtttcgatgatcggcagtgcggtcagggaaccggttttgccggtcactgcgccgttggtgaacttctctacgtactcttccgaaacgcgggatgcgcgctccagcagacgggagtggagatagaacacgtcgcctgggtaagcttcacggcctggtggacggcgcagcagcagggaaatctggcggtaagccactgcttgcttggacagatcgtcataaacgatcagcgcgtcttcaccgcggtcgcggaagaattcacccatggtgcaaccggagtacggtgccaggaattgcagcgcaggagactccgaagcactggcagccacgatgatcgtgttggccagggcaccgttttcttccagcttgcgaaccacgttggcgatggtcgattgcttctgaccgatagcgacgtagacgcagaaaatgccgctgttcttctggttgatgatcgcgtcgatcgccagagcggttttaccgatctgacggtcaccgatgatcagctcacgctggccacggccgactgggatcatggcatcgacagccttgtagccagtctgtacaggctggtctaccgacttacgccagatcacgcctggagcaactttctcgaccgcgtcggtctcggtgttgcccagtggacctttaccgtcaacagggttacccagtgcgtcgactacgcgacccagcagttccttaccaaccggaacttccaggatgcggcctgtgcacttggcgctcatgccttcagccagactggtgtacgcgcccaatacaacggcacctacggagtcttgctccaggttgagggccataccgtagacgccgcccggaaactcgatcatctcgccgtacatgacgtcggccagaccgtgaatccgcacgatgccgtcagatacgctgacgacagtgccttcgttacgggcttgggaggtcacatcgagcttgtcgatgcggcccttgataatttcacttatttcggaaggattgagttgctgcattgctctgctgccccttcaaactcaagatttcaatgcttcggcaagtttcgcgatttttccgcgaatcgagccatcgataaccaggtcgccggcacggataacaacaccaccaatcagggatgcgtcctccgaagcttgcaggcgcacttcccgattgagtcgtgcactgagaaccttggcgagtttgtcttgctgttcttggttcaatgcgaaagcactggtcacttcaacgtctaccgatttctctgcttcggccttgtacaagtcgaacagagcggcaatctccggcaacagcgggagacggtcgttttcggcaacgacgtgaatgaagttctgcactttcacatcaaacttgtcgccgcacacttcaataaaagtggcggccttgtctgcgctcgtcaggcgcggggccttgagcacgcgctgcatggtgtcgtcttgcgacactgctgcagccaggccgagcatggctgaccaagaggccagctgctggtgggcctgggcgtgctcgaaggctgccttagcgtaaggtcgggccaacgtggtcagttctgccatgatcgccctcgcttaaatttcagcagccagtttgttaaccagctccgcgtgcgcgttttgatcgattgtggcaccgaggatcttctcagcaccgccgaccgccagagcacccagttgggcacgcagcgcgtctttgacgccgttcagttcctgttcgatctcggcatgagccgaagccttcacacggtcagcttcgacgcgggctttttcaacagcctcttcgacgatctggttaccgcgtttcttggcttgctcaatgatttcagctgcctgtgccttagcatcgcgcagttggtgacccgctttctcttgggccaactccaggtcgcgagctgcacgggtggcagcgtccaagccatcagcgatcttcttctgacgttcgtgcaaagccgcgatgaccggaggccacacgaacttcatgcaaaacactacaaaaatgaagaacgcaacggattggccaatcagggttgcattaatgttcacgccaacacctcgctcattcgttgtccatcactccaatcaactcgaaaattcgagtgattagccagcgagttgaccaacgaaggggttcgcgaaggtgaagaacagagcgataccaacgccgatcatggtcacggcgtcgagcaggccggcgacgatgaacattttaacttgcagcattgggaccatttctggctgacgcgctgcgccttccaggaatttgccgcccagcaggccgaaaccaatggcagtacccagggcgcccaggccgatcaacagtgcaacagcgatagcggttagaccaactacagtttccatctttcctcccgacttttacgtcgtatggtttaggttttttagattttaaagcggtaaaacaaatcgtttcatagcccggtagggcctaccttcccgtttcaccgggaaggacatcagactagtcgagactggtcttaatggttctcttcgtgcgccatcgacaggtagacgatggtcagcatcatgaagatgaaggcctgcagggtgatgatcaggatgtggaacacagcccacgcccactgcagaaccacgcccaggccgctaagccagagcagaccactgccgaacatcacagcgatcagaatgaacaccagctcgccggcatacatgttgccgaacagtcgcagggccagggagatcggcttggcgaccaaggtcacgaattccagcaggaagttcaccgggatcagcagggcttgaacgaagatgttcttgctgccgaacgggtgcagggtcagttcgccgatgaagccgccgatacccttgaccttgatgctgtagaaaatgatcaacgcgaacaccgacagggccatgcccagggtggcgttagggtccgtggtggaaaccgcacggaatgggatgtggtggtcgccggagatcaggatagccagttgaggaatccagtcgaccggtaccaggtcgacggcgttcatcaggaacacccagacgaagatggtcagtgccagcggtgcaatcaccgggctgcggccatggaagctgtctttcacgctgccatcgacgaattcgaccagtacttcaacgaagttctgcaaagcacctggctgaccggaagtcgccttctttgccgccatgcggaaaatcaggacgaagatcagacccaatgcgaccgaccagcccagagtatccaggtggaaagcccagaagcccatttctttggcttctgctgcggagtgggcaaagccccagccgccattaggaagctgaccgaaggtcaggttctgcaagtggtgctggatatagcccgaagcggttgtttctgccatggttgcctcaaacgccctaaggtttcgaaagtcttgttttcattagcaggggagcgaaccagctgaccagttgggtcaacacgaagacgccgaatacagccagcggcgccaatggcttcacacctgcaaaggtcagtgcaaacagcactgccgtcaaaatcagtttccccgcctcgccagcataaaatgaccggacgatagcctgggctgctcgggcgccggaaaaccgaaaggccctgtgagcaaaatacatattgggcagcaaggctatcaggcctccgcagagtcctgaatatccgactacgactccatgccaataccaaagcgccaatgcggcgatcagcaagatgacaaattgagccaataaaaccggaaaaacggccaagcgatggaacggcaacgtgtttggcgtgcgggtttccatcactcttgctcctcaatggtcggctgccggaaatcaataacttggcataatttgtgccgacaaaatgcgcgcagagtataggggcggttctgcccctattcaactgccgggtagtgatttccgatcacgcgctacataagcaaatgtttcagcggatgtgggcaaggacgccctgaagctcatcaagggagttatatccgatgaccaattggcctttgcctttcttcccgtggcgaatttgcaccgcagagcccaggcgctcggccaggcgctgctcgagacgggcgatatccggatcaggtttggccgtttcgaccggtgcaggtttgccgctgagccattggcgaaccagggcctcggtctgacgaacggtgagcccccgtgcgacaacgtgtcgcgccccttcaacctgttgattttccggcaaaccgagcagtgcacgggcgtggcccatttccaggtcgccgtgggacaacatggtcttgatgacttccggcaacgcgatcaggcgcagcaagttggacacggtcacgcgggatttacccaccgcttcggccacttgttgctgggtcagctggaattcctgctgcaaacgctgcagggcgatggcttcttcaattgggttgaggtcttcgcgctggatattctcgatcaacgccatggcgatggcggtttcatccggcacatcgcgcaccattgccggaatggtttccttgcccgcctgctggctcgcgcgccaacggcgttcaccggcaatgatttcaaagcggccgccaccgatcgggcgtaccacgatcggctgcatcacgccctgggccttgatcgaattggccagctcttccagcgcctgggggtccatgtcccggcgtggctggtatttgccgcgctggatcaggtccagcggcaggtgttgcagctcgcgctcgtcggcctgcaccgcttgttcttcaagcgatgtgacggtcggaccactcaacagtgcatccagtccacgtccgagacctcgtttcttgacggccatggggattccttaagttggctgggctgcagcagtgcgtgaattgcggcgttggcgacgaaccatctcgccggccagcgccaggtaggcaatggcaccacgggattgtttgtcgtaggccaaggccggcatgccgtagctcggggcttcggccaaacggatgttgcgtgggatcaccgtgtcgtacagctggtcaccgaagtgttccttgagctgcgccgatacatcgttcatcaggctcaggcgcgggtcgaacatggtccgcagcaagccttcgatctgcaggttcgggttgagcaactcggcgatgcgcttgatgttatccacaaggtcgctcaacccttccagcgcgtagtactcacactgcatggggataatcaccccatctgccgctaccaacgcgttcagcgtgagcatcgacagcgacggcgggcagtcgatcagaatgtagtcgtaattctcgcggatcggcgccagggcgctgcgcagacggctttctttcatctgcatttccagcagcaccacttccgccgcagtcagatcgcggttggccggcagcagttgataaccaccgtgctcggaatagtgcatggcctgggccaggtcgcactcgccaatcagcaagtcgtagaccgagttttccaggccgtgtttatccacaccgctacccatggtggcgttgccctgtggatcgagatcgatcaacagcacccggcgcttggtcgcgaccagggatgctgcgaggttgatgcaggtggtggttttgcccacgccacctttctggttcgctatcgcgaataccttagccattcttgcttgtgttcccaatcatgccgtgcggcgcagtatcagcagatggcgttggccttggcaaccgggtacggccaaggcgtgttcgctatcgaggtggaagtctgccggcaatgctaacagctcatcgcttggatggacgcccttcattgccagccagcgggtgtcgcggtcgcccaggtggcgggtccagttgctgaagttctccatgctgctgaatgcccgggaaacaattccgttgaaaggctgttcaggtgtgaaggcttcgacgcgactgtggataacttgcaggttgttcagcttgagctcgagtttgacctgggtcaggaagcgggttttcttgccgttgctgtccaggcaagtcacttgggactcgggaaacaggatggccaacgggatgcccggcataccgccgccactgccaacgtccaaccagcggccgttttcgatgaatggcatcacgctcaagctgtcgagcaagtgacgggacaccatctcgtcgggatcacgcaccgcggtcaggttgtaagccttgttccatttgatcaacagggccaggtagcccaacagcaattcgtgctgggccggggtcaggtcgacgcccaactggcgtgcacctgtggataactcttcggcatgttgcgaggtgaccaacgaactcaagcgctttgctccaactgacggcccgcgccgcgttttttcaaatgaatcatcaacagcgaaatcgctgccggggtgacgccggggatacgtgaagcctggcccagggtctctggccgagttatccccagcttgctttggatttctttcgacagcccggaaatcccggtgtagtcgatatccacaggcagtttggtgtcttcactggcgcgcaagcgggcgatctcgtcctgctggcggtcaatgtaaccggcgtatttggtcttgatttcgacctgctcggcgacctgcgggtcttctgcgccctgtccggtcacttcgaccagaccagcgtagtcgatttccggacgggacagcaggttcagcaagttgtattcgtgggtcagtggcgtgccgaatttttcggcaatcgcatcgccctgctcggtgcccgggcggacccaggtgcttttcagacgctgctcttccagcgcgatgctttcgcgttttttgcagaaggcttcccagcgtgcgtcatcaaccaagcccagttcgcgacctttttcggtcaggcgcaggtcggcgttgtcttcgcgcaggatcaggcgatattccgcccgggacgtgaacatccggtacggctcctgggtacccagggtaatcaggtcatcgaccaatacaccgatgtacgcctcatcgcgacgcggacaccagctgtctttaccttgtgcacgcaatgccgcgttggttccggccagcaaaccttgggcaccggcttcttcgtaaccggtggtgccgttgatttgcccggcaaagaacaaaccgccgatcactttggtttccaggctgtacttcaggtcacgcgggtcgaagtagtcgtactcgatggcgtagcccgggcgcacgatgtgcgcgttttccatgccgcgaatcgattgcacgatctggatttgcacgtcgaacggcagggaagttgaaatcccgttcgggtacagctcgtgagtggtcaaaccttcgggctcgataaagacctggtggctttccttgtcggcgaagcggtggatcttgtcttcgatcgacgggcaataccgtggaccgatgccttcgatcactccggagtacatcggcgaacggtcgaggttcgcggcaatgatttcgtgggtgcgcgcattggtgtgggtgatccagcagctcacctgtttcgggtgctggtccttggagcccatgaacgacatgaccgggatcggtgtatcgccggcttgttcggtcatcaccgagaaatccacggaacgcccgtcaatacgcggcggggtcccggttttcaagcggccgacacgcagcggcagttcacgcagacgttttgccagggcaatcgacggcggatcaccggcacggccaccggaatagttctgcatgccgatgtggataagtccgccgaggaacgtaccggtggtcaacaccacggattctgcgaagaaacgcaggcccatttgggtgacaacaccgcgcacttggtcctgttcgacgatcaggtcatctgctgcttgttgaaatatccacaggttcggctggttttccagggtttcgcggaccgcggccttgtacaggatgcggtcagcttgagcccgggtagcacgtacggccgggcctttgcggctgttgagcacgcgaaattggataccgcctttatcagtagccatggccatcacgccgccaagggcatcgatttccttgaccagatggcttttgccgatcccaccaatggcagggttgcaactcatggcaccgagggtttccacgttatgcgtcaacaacagggtttttacgcccatgcgtgctgacgccagtgctgcctcggtaccggcatgaccgccgccgatgacgatcacttcaaaacgggaagggaaatccaccacgcacctcgtgcctgcttatttaggtaatcaggaattgattgttgaaagagttttagagctttggcggcaagtatagggacttagcccttcctaaagaaccctttgcacaaaatttaaccagctgtggatgaatcacagacaatagaaattaaaagagagaaatttattaaatctttgtttttatgtttatttctactgagctgactttctgtggatagatttacacaggcctttatttacggtgtgtacagcgattcaaaagtctgtggtcatgtgccaatgaggcccttggataagtgctttaagcctgtggattaaacaggttgttatccacagatgcgtttttgctcaggtttcagggcctgttatcaactgggcacaggggcggttattcacagagcttaatccacagaaatcagtgaatttgtctgtattcagcccacgacaacgccaaccgaaaccttccactcggtggtgagcacagcaaaaagagatctgttgtgagaaaacggcggggcagttaataatagcgattatcattaacctaccttgtcatgccctatgtcctcttcttcacacacggctgcggtccagcacatctatgagcagcaccactcctggctgcacggatggctcaaagggaagttgcataacgcctgtgatgcggccgatgtggcgcacgatacgttcgtacgcatcctgggcgggcgccatgcggcacagatcgttgagccgcgtgactacctggcgactatcgccaggggcctggtgattgatcgttaccgtcgacacgcgatcgaacaggcctacaaacaaaccctggccgaacggcctgaagccataaccatcagtgaagaagacaaagccatcatcatcgagacgttggtggctgtggataaagccttgtctgcactcggcgagcgagcgcggcggatattcatgctgtcccaggtcgaagggctgacttatcaacagatcgccgatcagcttcaggtttcactgaccacggtgaagaagcacatgatccgagcgttgactgaatgtgcgctgatcatggccagcctgtgatggcggtgcccgatcgcaagaccttcgaggccgctgccagttggtacgtccagtttcaatcccagacacccaccgccgatgagcgccaagcctggcaacgatggctcaacggcgatccgtcccatcaggctgcgtggaaccagatggaacagctgcagcgcagtctcggcgcgctgcctgcggatttcacccgccgcgcattgtcgaccacacagcaacgccgccaggtgctcaagtggatgttggtgctgggcggcaccgggtacctgggttggaatgttcagcaacacacgtccctgggtagtgtgtgggccgattatcggacggtcgtaggtgaacgccggcgcattgaattggccgacggcacgcggattgatctgaataccggcacggcgattgatgtgctgtttgatgggcgccagcgtttgatccgcctgcgcgaaggtgaggtccttatccacaccggcaagcggggcgtgcagacgcccttttatgtcgaaacccgccaaggccgcatccaggcattgggcactcggtttaccgtgcgccagatgcatgactcaacccgcgttggcgttctggaggatcgggtgaatgtgtcgcctggtgaccagcccaaccaggctcggctgctcagtgcgggtgaaagcgcagacttcgatcgccaaatagtgcagccaaacgccgtttaccgcacatcccaggcagcctgggtcgatggccaactgatcgtattggatgcacgcctcggtgatgttgtcgaagaactcgcccgctatcgcccaggtgtcctgcaatgcgaccgggactcggcacatctgcgtgtttccgggacttttcgcctggattccaccgatgcggtgctggccaatctgcaggccaccctgccgattcaagtgaaatacttcactcgctattgggtttcggtgaagcgaatcggctgatcgaaaaaatatacgcacgcagggttatcttttttttacctgacacggccctacaggtaatcacgatgccaccttcagggcttacccacctatgcgcgttcccaccaagctccgccagcgactttcctaccacggtatgacatgcagcctgctgctcggcacggccgccactgtcggtgtgttgttatccacaagcgccctggccgccagcgcggtgcagcactacgttattgcggccggccccctggataacgccttgagccaatttgccgccaaggcgaatgtgatcctgtctttttcacctcagcaaaccacgcgtttaaacacagctgggctggaaggtgactactccgtggaccaaggttttgcgctgctgctgcaaaactccggtttacaggcggtagtccaggcgcctggcagttatgtcctgcaggccgcttccaccggcgaactcacgctcgcgcccaccacggtcagcacttatcaacagggcggtttcaatcaggagattgctggagatgtgggctacaaggcgcagaacagtagagttggtaccaagaccagtacgccgctgtcggaaacaccacgttcggtatcggtcgtcaccggccagcgcatcaaggaccagaagtcgcaaaccctgaccgaagtgttgggctacgtgcccggtatctttgcaccaccctttgccgccggtgatgggctggcgggcgatctgttcttcattcgcggttttaatgccacggattacggctacggcctgctgcgagatggcctgcgtgtacaaggtaatcggtacgacaccaccagtgagccctatggcctggaacgggttgaaatcttccgtggtccttcttccctactctacggcgaaaatgcgcctggcggtctggtgaacctggtgagcaaacaccctactgcgacgccgcaaggtgaagtgcagttgggttatggctcgaataatcggcgtcagttgggtgtggatatctccgggccgctcaatgacagcggcaatatccttggccgggtagtgatgctcggtcgcaaatccgacacgcagaccgaccatgtgccagacgatcgcctatacatcgcgccatcactgaccctgaatttcgacgactacaacaccctcaccctgttggccaattaccagaaagaccacactaatttggaactcggcctaccggctgccggcaccttacttacaaaccccaatggcaagctctccaagcacactatgctcggcgacccggattggaatacgtttgaacgcgaagcctggagtaccggttacgaattcagccacagcttcaacgatgactggcagttccgtcagaactcgcgctacatgcagtctcgcatcaaccgccatgaaacctggcccagcgcgctgaacaatcgcggcttcgggactcagttgaacatgaccgcttatgaccgctacaacaagtcgatggtctattcgctggataaccagctggaaggcaaattccaggtcggcggcctggaaaacacggtgctgttcggtgccagctatgaccgcacttcgttcagtcaggattgggacgcggggtttgccggcaccatcaatgtgtataacccggtgtacctgcgtgacccgctgacgccggtggcggtgcaaaacaccctgctcgaacagcagatgaaaggcgtttatgcacagatccagagcaagtacgaccactggctgttcctgctgggcggccgtcaggactgggtcgacagcgatttccgcgacaaggtcaacaaggccagcaacaccggatccgatgaccgcaagttcacctaccagggcggggtgatgtaccagttcgacaacggcctgacgccgtatgtcagctactccactgcctttgtccccgtgcagcagatctccaacgccggctcgcccttgaaaccgatcaccagcagccagtacgaagtgggcgtgaagtacgagccgatcggctgggatacggcgatgacggtgtcggtgtatgacttgcgcaaggaagacgacacttacctcgatgccaccaccaatagctatcgccaagtgggcgaaagccgggccaagggcgctgaggtagaggtcaacagtaacctcacgcctaacctcaatgtcaccgcagcctatacctacactgacgcgaggattaccaaggattcggcgacatcgttggtcgagggccaccagatgaccggggttccgcgtaaccaggcctcagtgtggggcaagtaccgcttcctcgatggccaactcaagggcttgtccctgggcggtggtgtgcgttatttcgacagtaccttttcctacaccgcacccacgctttacggaaaattggatgcaggaagcgtcaccttggtggacgcagccgttggctatcagatagacaaacactggtctgtggatgtaaatgccaagaacctgttcgataaggaatatgtatctggttgcaacgatgcgggccgctgctattggggtgacagccgtaccctgctcggtacggtgtcttacaattggtaggacgctgtggataactcggttatttaccgatgcagaagctggaaaagatccgccccaacaaatcatcggagctgaacgcgccggtgatttcgcctaacagctgctgtgcctgacgcaaatcttccgccagcagctccccagcccccgccaaggttaattgcgcccgaccgtgctccaacgctgcgctcgcatggcgcaacgcctccaggtgcctgcggcgcgcactgaagctgctttccgaggtctgctcgtagcccatgcaggccttgaggtgctctcgcagcagttccaagccttcaccggccgacttcgcactcaggctgatcgtgacgtggccatccgcgctggtttccagcgcaatggcttcaccggtcaagtcagccttgttgcgaatcagggtgaccttggcagggtccggccggtgctcaaggaattccggccacagggcgaaaggatccacagcctcgggcgccgtagcgtccactaccagcaatacccgatccgcctcgccgatggctttgagcgcgcgttccacaccgatcttttccacctggtcgtcggtgtcgcgcaaaccggcggtgtctacaacgtgcagcggcatgccgtcgatgtggatatgttcgcgcaggatatcccgtgtggtgccggcaatctcagtgacgatggcggcttcacggcccgccagggcattgagcaagcttgatttccccgcattgggccgccccgcgatcacgacggtcatgccatctctcagcaaagcaccctgcccggcttcacgcagcactgtggataactcatcgcgaactttatccagcatcgccaatacgtggccatcggcgagaaagtcgatttcttcttccggaaaatcaatcgccgcctcgacgtagatacgcaggctgatcagttgctccgtcaagttatgcacacgcagggagaacgcaccctgcagggagcgcaatgcattacgtgcggcctgtgcagaactggcttcaatcaggtcggcaattgcttcggcctgggccagatcgagcttgtcgttcaagaacgcccgctcgctgaattcacctgggcgcgccaagcggcagcccaattgcaggcagcgctgcagcaacatatccagcacaaccggaccgccgtgtccctgcaactccagcacatcttccccggtgaatgagttcggcccagggaaatagagcgctaatccttcgtccagcacgccgccgtcagcatccaggaactggccgtaatgtgcataacgcggcttcaactcacggccactgatggccttggctgccacgcccgcgagcggccctgaaattctaacgatgccgacaccgccgcgaccttgagcggtagcgacagcagcgatggtttcacgaggagcgctcatcaacagtttccagaccaaaagtgacagaaagcaaaacgccccactagggggcgtcttgagtggttatccacagagtaagttacgcagaggcttttgcggtagccgcttcgatcttacgtgtgatgtaccactgttgagagatcgacaacacgttgttgaccacccagtacagcaccagaccagctgggaaccacaggaagaagaaggtgaagatgattggcatcattttcatcactttggcctgcatcggatccggcggagtcgggttcaagcgctgctggataaacatggtcgcgcccatgatgatcggcaggatgaagaacgggtctttgatcgacaggtcagttatccacaggatgaacggcgcctggcgcatttccacgctttccaggagtacccagtacagcgacaggaacaccggcatctgcaccagaatcggcaagcatccacccagcgggttgatcttctctttcttgtacagctccatcatggcctgcgacattttctgccggtcatcgccatgttgttctttcagcgccgccagtttcggagccacggcacgcatgcgcgccatcgacttgtagctggctgccgacagcgggaagaagatccccttgatcagcatggtcaggaagatgatcgagaagccccagttacccacaatgctgtggatatgttgcagcaaccagaaaatcggctgggcgatgaaccacaggaagccgtaatccacagtcagctcaagacctggggacaactctttcagcacagcctggcttttcgggccggcgtacaggatagcgctggtttcagccttggcgccgggtgcgacggtcaacgccgggccggtaaagccaatgatgtagttaccttggctgtccttgcgggtttgaaccaggttggcttcacccttgttcgggatccatgcggtcacgaagtagtgctgcagccaggcaacccatccgccttgaacggtttctttcagcgagcccttgtcgatatctttcatcgacacttttttgtacggctcgctacttgtccacagggcggcgcccaggtaagtcgcggtgccggtagcagtgctggaagaaggatcggagctggcatcacgcttgagctgggcaaacaggttgccgctccatggtttgtcgctttcgttgtcgatcaggtaagtgaccttcaagtcgtacaaaccacgggtgaagctgaagcgcttgatgtagttgacgccgtcgaggctgaatttcaggtcgacgttcaactggttctggccatcagccagttgataagtcttctgttcggtcgagtaaatcggacgaccggtagcacgtgcatccggaccattggtgccggtcaggccgctttgcgccagataagtacgctcaccaccgttatcgaacagttggaacgggacatccggatggtcttggcgacgtggatacagcggcagtttcaactgcgcaatatcaccaccttgtgggtcgatagccaggtcgagcacatccgttttgacgtggatgaggtctttgttggtgaccactggcgtttctaaaggggcgcttgtctcgccattcgcgctgggaacatcggcactcgcggacgcattgttacccagcggggtgtccggaatagccggcgcagcctggttggtagcaacattctgagtcggcagggcagcctggccgtagtcctggttccactgaagaaccatgacgtaggacacgattgccagggcgacgatcaggatcgtgcgtttaatatccatgattactcggccatcgaagaagaacgggaggtagggataggtggaaccgggtcataaccaccgggattccacggatgacagcgacctaaacgacgaaaggtcagccagccaccgcgcagaagaccatggttttctatggcctctaacgcgtagcaggaacaactggggtagaaacgacagtggttggccatcagaggactaatggcatagcgataaaactggatcggaacgagtgccagtttacgcatcaaggctgtctacccctacagtttcggtgctgactgctggtgctggcttgtgggtacgcgccaaacgtttccagagcttgccgaaatgctgaatcaattcggggttttctacgtcccccaagcctttgcgcgcgacgataacaatatcccaaccaaccagagtgtcctggtggaggcgaaacgattcgcgcatcagacgcttgaggcgattgcgctcaacggagagctttacgctcttcttgccgatcaccaacccgagtcggggatgatccagatcgttgttacgcgcaaggagcaggagatttttccccggaaccttgccggtgggggagtcaaagactgccttgaaatgccggggggttagcagacgcttttcccgactgaagtcctgactcaccaccagtaccggattatcaaactgccagacgcgcacgacctttggcgcgacgacgcgacaggacagcacggccgttcttggtagccatgcgagcacggaagccgtgggtgcgggcgcgtttgatggtgcttggttggaaagtacgtttcatggcgttgttacctggttcgtccacaacgggccggaatggcccccgttttaagagaccggcgattctagtgaaagcaagcctctaggtcaatttccaaccagcttttcctttaattagatctccacaggccattggctcttttctgtccgtttggtttccagtggtcatgggatagatataaaaataaagaaggaagttatttaaagcttttctgtaaagcttataaaagctaggtaggcgttcatctgtggataactcacttgaggccatattccacctggtgtacagagaatgacaacccgggggagaaacggtgctctgcctgtgctgcgctgtcggataagctgtgcgtggaacgggatgttatccacaggccagttacccacagactttctcccccacttgtgcaacgacctcaggtaggcttatccacagagcttatgcacagaccattggtcgcctttattaccgttaagacgttgattttggccggcctgtgatcaagctacatgtggataagtggacggctcgccgctacaatggcggctgtttttgcctcaccggctttcaacttaggggatatccgtgtcagtggaactttggcagcagtgcgtggagcttttgcgcgatgagctgcctgcccagcaattcaacacctggatccgtccgctacaggtcgaagccgaaggcgacgagttgcgtgtctacgcacccaatcgttttgttctcgattgggtcaacgagaagtacctgagccgcgttctcgaattgctcgatgaacatggcaacggcctcgcgcccgtgctctccttattaataggcagcaaacgcagctctgcacctcgagctgctccgaatgcgccattggccgctgcggcgtcgcaagcccaggcagccgccacaccggctgccagtgcgcctgctcctgcaccggcggcgtccaaatcgtctgcgcgaaaaagtgcgccagaaaacgaagagccatcccgcgatagctttgacccgatggcaggcgccgcgtcccagcaagccccggtccgcgccgaacagcgcaccgtccaggtcgaaggcgcgctcaagcacaccagctacctgaaccgtacgtttaccttcgagaatttcgtcgaaggtaaatccaaccagttggctcgcgcagccgcctggcaggtcgccgataaccccaagcatggttacaacccgctgttcctttatggtggtgttggcttgggtaagacccacttgatgcacgctgtgggtaaccacctattaaagaagaacccgaatgccaaggtcgtgtacctgcactcggagcgcttcgtggctgacatggtcaaggccttgcagctcaacgcgatcaacgagttcaagcggttctatcgctcggttgatgcgttgctgatcgatgacattcaattctttgcccgcaaagagcgttcccaggaagagtttttccacaccttcaacgccctgctcgaaggtggccagcaggtcatcttgactagcgaccgttatccgaaggaaatcgaaggcctggaagaacgtctgaagtcgcgcttcggctggggcctgaccgttgcggtagagccgccggagctggaaacccgcgtcgcgatcctgatgaaaaaggccgatcaggccaaggtcgacctgccacacgatgccgccttctttatcgcccaacgcatccgctccaacgtgcgtgaactcgaaggtgcactcaagcgggtcatcgcgcactcacacttcatgggccgcgacatcaccatcgagctgattcgcgaatccctcaaagacttgttggcgctgcaggacaaactggtgagtgtggataacatccagcgcaccgtggccgagtactacaagatcaagatttccgacctgttgtccaagcgccgttcgcgctcggtggcacgtcctcgccaggtggccatggccctctccaaggagttgaccaaccacagcctgccggaaatcggtgatgtgtttggcggacgcgaccacaccacggtcttgcacgcgtgccgcaagatcaatgaacttaaggaatccgacgcggatattcgcgaggactacaagaacctgctgcgtacactgaccacttgatgacaccagcgcagcttattaaggcaagggactagaccatgcatttcaccattcaacgcgaagccctgttgaaacccctgcaactggtcgcaggcgtcgtcgagcgccgacagaccttgccggtgctctctaacgtattgctggtcgtccaaggccagcaattgtccctgaccggtaccgacctggaagtcgagctggtcggccgtgtacagctggaagaacccgccgaacccggcgagatcaccgtgccggcgcgcaagctgatggacatctgcaaaagcctgccgaacgatgcgctgatcgacatcaaggttgatgaggcgaagttggtcgtcaaggccggccgcagccgcttcaccctgtccacgttgccagccaatgatttcccgacggttgaagaaggcccgggttcgctgacctgcagcctggatcagagcaagctgcgtcgcttgatcgagcgcaccagctttgccatggcccagcaggacgtacgctactacctcaacggcatgctgctggaagtgtcggaaggtatcatccgcgccgtcgctaccgacggtcaccgtttggcaatgtgttcgatgcgtgccgatatcggccaaccggatcgtcaccaggtgatcgtgccgcgcaaaggtatccttgagctggcgcgtctgctcaccgagcccgaaggcaacgtcagcatcgtgctgggccagcaccatatccgcgccaccaccggtgagttcacattcacttccaagctggtcgacggcaagttcccggattacgagcgcgtgttgcctaaaggtggcgacaagctggtgctgggcgatcgccaagcgctgcgtgaagcgttcagccgtaccgcgatcctgtccaacgagaagtaccgtggtatccggctgcaactggccaacggtcagttgaagatccaggcgaacaacccggagcaggaagaagcggaagaagaagtgggcgttgactacaacggtggttcgctggaaatcggcttcaacgtgagctatctgctggacgtgctgggtgtgatgaccaccgaacaggttcgcctgattctgtcggactccaacagcagcgccctggtgcaggaatccgacaacgacgactcggcttacgttgtcatgccgatgcgcctgtaaccatgctcagcagaagctagatgtccctcagtcgcgtctcggtcaccgcggtgcgcaatctgcacccggtgaccttctccccctctccccgcattaatatcctccacggcgccaacggcagtggcaaaaccagcgtgctggaagccatacatctgttggggcttgcccgttcctttcgcagcgctcgcctgttacctgtcatccagtacgagcaattggcctgcacggtgtttggccaggtcgaactggctgaaggtgggcacagcagcctgggcatatcccgagatcgcggtggagagttccagattcgtattgacgggcaaaatgctcgcagtgccgcgcagcttgcggaaattctgccgctgcaattgatcaaccccgacagctttcgtttgttggaaggtgcaccgaaaatccgcaggcagttcctcgattggggagtgttccacgtggaaccacgtttcatggccacgtggcagcgcttgcagaaggccctgcggcagcggaactcatggctgcggcatggtacacttgacgccgcttcgcaagcggcctgggaccgggaactgtgcctggccagcgacgaaatagatgaataccgccgcgcctacatcaaagccttgaaaccagtctttgagcagactttgagtgagttgttggacctcgaagggctgacgctgagttactaccgtggttgggataaagaacgtgagctgagtgctgtgctcgcgacgtccctgcagcgggatcagcaaattggccatacccaggccggaccacaacgggctgatttgcgccttagattaggcgctcacaatgccgcggacatcttgtcccgtggtcagcagaagttggtggtgtgcgcgttgcgtatcgcccagggccatttggttagccaggctcgacgcggtcagtgtatttatctggtggatgacttgccgtcggaactcgacgagcagcaccgccgcgcgttatgccgcttgttggaagaattacgctgccaggtgtttatcacttgtgtagaccacgaattattgagggaaggctggcagacggaaacgccagtcgctttgttccacgtggaacaaggccgtatcacccagacccacgaccatcgggagtgaaggcatgagcgaagaaaacacgtacgactcgaccagcattaaagtgctgaaaggtttggatgccgtacgcaaacgtcccggtatgtacattggcgacactgatgacggtagcggtctgcaccacatggtgttcgaggtggtcgacaactccatcgacgaagctctggccggtcactgcgacgacatcagcatcatcatccacccggatgagtcgattaccgtgcgcgacaacggtcgcggtattccggtagacgtgcataaagaagaaggcgtttcggcggcagaggtcatcatgaccgtgctccacgccggcggtaagttcgacgacaactcctacaaagtctccggtggtttgcacggtgtgggcgtgtcggtagtgaacgcactgtccgaagagctgatcctgactgtgcgccgtagcggcaagatctgggaacagacctacgtccacggtgttccacaggaaccgatgaaaatcgtcggtgacagtgaaaccaccggcacccagatccacttcaagccatcggctgaaaccttcaagaatatccacttcagctgggacatcctggccaagcgtattcgtgaactgtcgttccttaactccggcgtgggtatcgtcctcaaggacgagcgcagcggcaaggaagagctgttcaagtacgaaggcggcttgcgtgcgttcgttgaatacctgaacaccaacaagactgcggtcaaccaggtgttccacttcaatatccagcgcgaagacggcatcggcgtggaaatcgccctgcagtggaacgacagtttcaacgagaacctgttgtgcttcaccaacaacattcctcagcgtgacggcggtacgcacctggtgggtttccgttccgcactgacgcgtaacctgaatacctatatcgaagccgaaggcctggccaagaagcacaaagtcgccaccaccggtgacgatgcgcgtgaaggcctcaccgcgattatctcggtgaaagtgccggatcccaagttcagctcccagaccaaagacaagctggtgtcttccgaagtgaagactgccgttgaacaggaaatgggcaagtacttctccgacttcctgctggaaaacccgaacgaagccaagctggtcgtcggcaagatgatcgacgcggcacgtgcccgtgaagcggcgcgtaaagcccgtgagatgactcgccgtaaaggcgcactggatatcgctggcctgccgggcaaactggctgactgccaggagaaggaccctgccctctccgaactgtacctggtggaaggtgactctgctggcggttccgccaagcagggtcgtaaccgtcgcacccaggctatcctgccgttgaagggtaagatcctcaacgtcgagaaggcacgcttcgacaagatgatttcttcccaggaagtcggcaccttgatcacggcgttgggctgcggtatcggtcgcgacgagtacaacatcgacaagctgcgctaccacaacatcatcatcatgaccgatgctgacgtcgacggttcgcacatccgtaccctgctgctgaccttcttcttccgtcagttgccggagctgatcgagcgtggctacatctacatcgcccagccgccgttgtacaaagtcaaaaaaggcaagcaagagcaatacatcaaagacgacgacgccatggaagagtacatgacgcagtcggccctggaagatgccagcctgcacttgaacgacgaggctccgggtatctccggtgaagcgttggagcgtctggttaacgacttccgcatggtgatgaagaccctcaagcgtctgtcgcgcctttaccctcaggagttgaccgagcactttatctacctgccagccgtaagcctggagcaactgggcgaccacgcgcacatgcaggactggctggcccagtacgaagtgcgtctgcgcactgtcgagaagtccggcctggtgtacaaagccagcctgcgtgaagaccgtgaacgcaacgtatggctgccagaggtcgagctgatctcccacggcctgtcgaactacgtcaccttcaaccgcgacttcttcggcagcaatgactacaagactgtggtcaccttgggcgcacaattgagcaccctgttggacgacggcgcttatattcaacgtggcgaacgcaagaagcaggtcaaggaattcaaggaagccctcgactggctgatggctgaaagcaccaagcgccacaccatccagcgctacaaaggtctgggcgaaatgaacccggatcagctgtgggaaaccaccatggacccggcccagcgtcgcatgctgcgcgtgaccatcgaagacgccattggcgcggaccagatcttcaacaccctgatgggtgatgcggtcgagcctcgtcgtgactttattgagagcaatgccctggcggtctccaacctggacttctgattctggtagtctgctgaacccaaaaggccaacgctatgcgttggccttttttattgggtgaatatcggctgtctgctgaatgctccacgtggaacattctggtttttagccctgtggtgagggcaccgctacactttccaatcggtaaccgtacccatagatcgtcaacagctgccaccccctatccgcggtcagtcccaacttattacgcagtcgatagatgtgcgtatcgagcggccgcgacgacaccatttcttcgtgggtccaaaaccgctcatagagatactctcgggaaagcggtcgggccaggttggcaaacaagcaactggccagacggtactcgcgttcggtgaggttgatcggtttgcccgcccgggtcacggtcaactccgcatcatcaaaggtcaggtcgttgaagctctgcacttcatggttggctgatttctgcaggccgtggcgacgtagaaccgcagtcaccctagccttcagttcattgggacggaagggcttgctgacgtaatcatcggcaccactgttcagcgcagtgacgatatcgctctctgcatcgcggctggtcagcatgatgaccgcaggcggcgactccatgtgttcacgggtccagcgcaacagagcaataccgctgatatccggcaattgccaatcgagtatcaacaggtcgaaggtttcccggcgcagttggcgtagcaggtcttcaccgcgttcgaaacagtgcagggtccagggttgttcggcggtgctggggatttgtcgcagtgtctgttccacccgtcgcagttccgcgggttcgtcatccagtattgcgacacgcatgggtgggtcctttcttcttgaagagtacggcagccgtcagccgggttagtgatggcacgcactgcgcagatgccggtctctgaatctgaagaattgtgttcagatccgtcgaccccttggatctctcggtacgctggcatcaatgtgcgattaacccattgaaagtccttgataccgatgtgggaaagataccggctcccgcccataaggaaaaggatcagccgacgcatgcgctgccgtacactcctgcttgctggtgtcagataccttctggaacccaatcttgatgagcaccatgatcctttcttcgaaccgcctgtgccgcgccctaccctcattgttgatcatggctgtcggttctgcaggggcggttggcaagacgcgcgcgccttacattgatgatcacatactgtgtcacccccagcccctgccggcggtggttcagcatctcaccggggaagcctggaaaatcgataccaagggcgaggcgagccttttgctggaaggcatgaccattgacgaacaggagggtgtgaagacctcggcgtcggcgttcgtcagcctgttgctcggtgacggatcccgcgtggtgttgcccgcaagttcacaggttcgattgcatctggagcgcaagctgtcgattccccaggttgtactcgaacaaggtcaggcggaagcgtatgtgatcaagcgtgccagcgaccatgatcgttttcagatcgtgacccccgtgggggtgttgggcgtacgcggcacgcatttccgggtgcgtaacgacgctgagcaatcggtgctcgaagtgttggacgggcaggttgccgtcagccgcgaggcaaaaaaccagccgatggaacaggaggtaaaaatcggtgcccggcaaggtctgctgttcaggaagcagggagacctgaaaccggttgagctacttgctgcaccgaagctcgtgggtcaggacggccagaaaggcgatgcgccggtctggagcctgtaccttcggcctttgcccggagcccagcgataccgggcacaggtcgctaccgacaaagccttcatggacatcaagcatgaaaacttttccagttcgccgaaaatgagcttcactgggctcaaagcctcgttctaccacgtgcgcctttcggcctacgatgaaaacgggctggagggagagaccggggtctatgacatcttttactacccacccaccacccaggcacattgacctatgaagctctggggcaagaccgagaaacgccagcccacccatgcccagcgcctgtttcatggcctggtgcgcgagtggttgtggatcgggttgctattgctgcctgttaccgtctatctgtcgttgagccccggcctggcgttgaataatccgctgtacgacagccttcggcgccttaccccgctgcctgtagacccgcgcatcctgctggtgaccattgatgacgccagcctgaaaaagctcggccaatggccctggccacgcagcttgcacgccgacctgatcgaccgcctcagcgctgggcaaccggcgggtatcctcttcgatgtgatcttcagtgagcccggcgaccccgccaatgacaaacgcctggccgaagcggtatgcaatgccggcaacgttttactgccgctggtacgtgagggcactgctagttatagccagcccggtgggcagatgctggcgctgcatagatgcgccaagggcgtgggccacatcaatgtcgaagcggacagcgacggcgtggttcgcagcctgtatctgcgcgaaggacctcccgacacgacggcaccgcaactggcctggctggcctatgagatgagcggggagctatcggacatgccgggcgagccgcagcaggcgacttcacaacactggcaccgcgagcacgccatccgtatcacgtttatcgccccccatacccatttccccagcgtgtcctacgtcagcgtattgcgtggtgaggttcctcccgagcagctaagaggccgcttgatcctggtgggttcgacggcttccgggatgggggatcggttcgtcacccccctctcctccacggtcggtacaacggcaggggtggaaatccaggccaacgtgctcaacggcttcctccaaggccgcagcatcgtcgacctgccgggctggctcgcggcgctgatggcgacttctctggtggcgttgttgctgggcctgctgctctaccgcccgcgctatgcgctgtggatgactctgggctgtatggctgctgcgttacttggcgcctgggccttgttgcgccttggccactggtggtcgcccgccgcatgcctgattggtttgctgcttagctacctgatctggaactggcgtcgcctgagcgtgatcctcgcctacttcggctgggaactggcgcgcctggataacgaacccaaggtcctgcccgaacgccgccgtgcgcccgccagcaaaggcgacgtgctgcaggcgcggatctttgccctggagcaggccgtaagccgcacgcgcgatacacggcgcttcatggcagatgggttggagtgcctgccggtggcgacgctgatcaccgaccccaagggcaacatcctgctggccaaccgcattgcccgcgaagtgttcggcaatgacctggtcaccgaaaacctgctggagcaattggccgacctgggctacccgccgctgcacaatggcgtgcgccctgccctttcggcgctggaactggtcgagttccgcgacatccaccaacgcagcctgcgcatggaattggcgcccttgctgccggccgagggtgatgttgcactgggctggctgttgagcctcactgatttgagcaaggagcgcgaagcgcaacaacaccgcgaaaccatgttgcgcttcctttcccacgacctgcgtgcgccgcactcggcgatccttgcgctgctggatgtgcataacgacgagtccccggtattcgcccagatcgaacagcaggttcgccgtgccttgggcctcactgaatctttcgtgcaactggcgaaagccgaagctgacggttaccagttccagccgacgctgtttgccatgttggtgatggatgcattcgatcaggtggcgttgattgcccagctcaaggggatccacctggttcacgacctggatgaagctgacgagggcatggtctccgctgaccagtcgctgctcactcgggcgttgttcaacgtgctggagaatgccatcaagtattcgccctcgggcaccactgtcaggttgagacacagcagtgcacaaggttggttggaatgccgtatcagtgaccaggggccggggattgcagcagaggacttgccggagctgttcagccaataccggcgctttgaatcggcacagggcagtgaaggattggggttgggcctgacgatggtcaaggctgtggtagagcgccatggtgggcgcatcagctgcgaaagcgtggtaggcaaaggcaccacattcagcgtgcaattacccctgctggaagactgaaaaaacgtactttagtgttgtgaataaaaaaccggtcgcaaggaccggtttttttatgcagaaaaaacttatgcacctttttcttgattttatgggcttgagaaatatgcaataaaatcagcttgttatgattcaaaaagcgcaattcgccaacaaaccgtacacaggttatccacagatgctcagatcaccggagtgtcgaccacaacaggctctggcggcagcgaacccatggcccgttgctgcgcttcattccacgcctgggcgcggtcattcagcgcggcaatggcacgtgggccttcaccttctgcgtacatcggttcgccaatcaccacggtgatggtgccttcgcgcttggcccagccggtctttggccagaacttgccggcgttatgggcaatcggcagcacgggcaggttggcgttgaccgccaaagccgtacccccgcgtgagaacttgcctacggtgccgtagggcacgcgagtcccttccgggaagatcagtacccacacgttatccttgagcagttcatcgcccttcttggccacgtgcttgagcgctgccttggggttgtcgcggtcgatggcgatcggacgcaacatggccatggcccagccgaagaacggcacgtacagcagctcacgcttgagcacctggctcaggggcgagaagtacgccgagagaaagaacgtctcccaggtgctctggtggttcgacagaatcacgcaaggctggtccgggacgttttctgcacccttgatctcgaaacgaatattcagaaacaccttggtcagccacaacgcgcagcggcaccagtagacgttgataaagcgatagcgcgccttgaatggcaaaaagggcgcaataaaaaagctcagggtgcaccagagaaacgaactggtgcccaacagcaggtaaaagaagaaggttctgatggcctgcaaaatcgacatggcggcatttaccgttgcgggacaatgcccgcctgttaaaagcgcactcccgaacagtccttggtcaggaagtcgagggcggctagttgttgataagttctgcggcaacggccgccagatcgtcaaaaatcaaggtgcctaccggcaggtttttcgcctgggtcttttcgcctttcccggtcttaaccaaaactggctgagagtcgacggctttggccgcctccaggtcaccgagactgtccccgacgaaccatagcccagccaagggcaccttgtaatgttctgcaatggttttcaacatgccaggcttgggtttgcggcaatcgcagccctcatctggcccgtgggggcagtacaccaccagccccacctcaccgccctgctcggccaccaatgcgcgcaggcgtgcgtgcatggcgtccaaggtggcgatgtcgtagtacccgcgagcgatgccggactggttggtggcgatggccaccgtccagccggctttgctcaactgcgcgatggcctcgatggagccgggcagtggaatccattccgccaccgacttgatgtaagcgtcggagtcgtagttgatcaccccgtcccgatcgagaatcagcagtttcaccatggtcagctcagcgtcgaaatgtcagcgatattgacgaacaagccgcgcaggcgcgccagcatggcgtagcggtttttccgcacgccggcatcgtcggcattgatcatcacggcttcgaaaaacgcatccaccggctcacgcaaggtggccaggcgcgccaatgcttcggcgtagttgcgctcggcgatcagcggcttcaccgcgttttcggccttggcgatggccgagttcagcgagaactccttggcatcggcaaacaggccagggtcgacatcagcgttgcccaggccttcggccttgctcagcaggttcgacacacgcttgttcacagcggccagggcatcggcttccggcagcttgcggaaggcctgcacggcttgtacgcgctgatcgaagtccagcgccgaacccggctgcagggcacgtaccgacaggtacaccgacacgtccacgccttcgtcttcgtaacgcgcgcgcaggcggtcgaacacaaactccagcacttgctcggccaggccggcctgcttgaccttggcaccgaactggccgacggcaaacaccacggcctgggtcaggtcgaggtccagctttttgtcgatcaggatacgcagcacgcccaaggccgcacggcgcagggcatacgggtctttgctgccggttggcaacatgccgataccgaagatacccaccagggtgtccagcttgtcggcgatcgccacggctgcaccggtcagggtggtcggcagttcagcgccggcaccgcgtggcatgtactgctcgttcagggccagggccacgtcgtctggctcgccgtcgttgagggcgtagtagtaaccggcaacgccttgcatctccgggaactcgccgaccatttcggtggccaggtcgcacttggacagcaggcctgcacgtgcagcccaggcggaatcaccaccaatgcgtggtgcaatgtaggcggccagcttggaaacccgcacggccttgtcgtacacgctgccgagtttttcctggaacaccacgttctgcaggcgcaggttgaagtcttccagcttctgcttcttgtcttgcttgaagaagaactctgcgtcggtcaggcgcgggcgtacgactttctcgttaccagcgatgatctgctgggggtccttgctctcgatgttggccacggtgatgaagcgcggcagcaacttgccgtccacgtccagcaggcagaagtacttctggttgtcctgcatggtggtgatcagggcttcctgcggcacgtcgaggaaacgctcttcgaacgagcacaccagcggcaccggccattcaaccagcgcggtcacttcgtcgagcaggcttggcggcacgatggcagtgccttcctgcaagcgggccaattcctcagtgcgcttgctgatcagctcgcgacgttcgttggcatccgccagcacataggccgcgcgcaggtcgttgaggtagttggccggcgaagtgatgcgcacggcttctggatggtggaagcggtggccacgggaatcacggccggccttctgggcgaggatggtgcagtcgatgacctggtcaccgagcagcatcaccagccattgggtcggacgtacgaattcttccttgcgtgcaccccagcgcatgcgcttggggatcggcaggtcgttcagcgaatcttcaacgatggtcggcagcaggctggcggtcggcttgccggtgatgacctggctgaaccgcagtttcggcccgctctggtcgatctcactcagttccacgccacacttcttggcgaaacccagggcagcctgggtcgggttgccttcggcgtcgaacgcggcctggcgcggtgggccgtcaaggttgatgctgcggtccggctgctgggtttccagtgcggtcagcaacacggccaggcggcgtggcgcagcgtagacttttttcgcggcgaacttcaggccggcggtttgcaggcccttttcgataccggccatgaacgcatcggccagggtgttcagtgccttgggtggcagctcttcggtgcccagttcaaccaggaaatcttgagcactcattgtgcagcctccagcttagccaacacttcatcacgcaggtccggggttgccatcgggaagcccagcttggcgcgagccagcaggtaggcttgggcgacggaacgcgccagggtgcgtacacgcaggatgtattgctggcgcgcggttaccgagatggcacggcgcgcgtccagcaggttgaaggtatgggacgccttcaacaccatttcatagctcggcaacggcagcggctggtcgagttcgatcaggcgcttggcttcgctttcatagaagtcgaacagttcgaacagcttgtcgacgttggcgtgttcgaagttgtaggtggactgctccacttcgttctggtggaacacatcgccgtaggtgaccttgccgaacgggccgtcagcccacacaaggtcgtagaccgagtccacgccctgcaggtacatggccaggcgctctagaccgtaggtgatttcgccggtcaccgggtagcactcgataccaccggcctgctggaagtaagtgaactgcgtcacttccatgccgttgagccagacttcccagcccaggccccaggcacccagggtcggcgattcccagttgtcttcgacgaaacggatgtcgtggaccaatgggtccaggcccacatgcttgagcgagcccaggtagagttcctggaagttgtccgggttcggcttcaataccacctggaactggtagtagtgctgcagacggttcgggttttcgccgtagcggccgtcagtcgggcgacgactgggctgcacataagcggcgttccaggtttccgggccgatggcccgcaggaatgtagcggtgtggaaagtgccggcgcctacttccatatcgtagggctgaagtaccacacaaccttgctcggcccagtattgctggagggcgaggatcaagtcttggaaggtacgcacggctggcgtaggctggctcacgaaattcacctgttacttgggctgcgatttaaagagcgggagtatacccgattcggccccgccaccactccctggagccttatgccacgctgcttttggtgttctgaagatccgctgtacatggcttatcacgatcaggagtggggaacgccgctgcgcgatgcgcagggtttgttcgagttgcttttgctcgaagggttccaggcgggcctgtcctggatcaccgttttacgcaaacgcgagcattatcggaaggtcttgttcgggtttgatgcgcagcggttggcccaactgagcgacgccgagatcgatgcgctgatgctcgatccgggcatcgtgcgtaatcgcctgaaactcaatgccacccgacgcaatgccgcagcctggctggcgctggaggacccggtgggtttgctctggtccttcgtcggcggcaaacccaaggtcaatcacttcaaggaccgcagcgaagtcccggcgatcacggccgaggccgaagccatgagcaaagccttgaaaaaagccggtttcaccttcgtcgggccgaccatttgctacgccttcatgcaggcctcgggcatggtcatggaccacactcaggactgcgaccgttacgcggacttggtcaacgccggttagaatgcgcgctttgcgcaccacacacgatcaggagtgacctgtggaaaagtttaaaggcgccttgctggtaggcgctctgcggttgtttgcgctgctgccctggcgcgctgtccaggcggttggcacggccatcggctggatcatgtggaaaacccccaaccgctcccgcgacacggtgcggatcaacctctccaagtgcttcccggacatggatccggccgcccgtgaacggctggtcggccagagcctgatggacatcggcaagtccctgaccgaaagcgcctgcgcctggatctggccggcccagcgctccatcgacctggtgcgcgaagtcgaaggcctggaagtgctgcacgaagccctggcctcgggcaaaggcgtggtcggtatcaccagccacctgggtaactgggaagtgctcaaccatttctattgcagccagtgcaagccgatcattttctaccgcccacccaaactcaaggcggtggatgaactgctgcgcaagcagcgcgtgcaactgggcaaccgcgtggcggcttcgaccaaggaaggcatcctcagcgtgatcaaggaagtgcgcaaaggtggccaggtcggaatccctgccgacccggagccggccgaatccgccgggatcttcgtgccgttcttcgccacccaggcgctcaccagcaagttcgtgccgaacatgctcgccggccacaaggcggtgggcgtgttcctgcatgcgctgcggctgccggacggttcaggctacaaggtgattttggaagcggcgccggaagacatgtatagcaccgataccgccacgtcctgcgcggcgatgagcaaggtggtggaacgttacgtcggtgcctacccgagccagtatatgtggagcatgaagcgcttcaagaaacgcccaccgggtgaagagcgctggtactgattcaagatcaacgcaaaaccaatgtgggagggggcttgcccccgagagcggttgctcagtcaaataggtatcgactgacacactgccatcgggggcaagccccctcccacatttgaattgcgctcaggcttggcggtcgagttttttcaggaacacggtcatctctttctcggcctgcttatcgccgtgagcaagcgccgcttcgatgcccttctcccacgccagccgcgccgctgcacgatcttccagccccaactgcgccttgcccaacaacttccacgccgccgaatacttcgggtcgaactcgacgcacttgctaaaatgctccgccgccttggcgttgtccttcagatccagatagcccttgcccaaaccaaagcgcagcagtgagttatccacgcccttggcgagcattttttccagggattcgagcatgtcggccactccgttcgatcagaaaaaactcaaccccacgtggaacaacttctccacatcgcgaatatgtttcttgtccaccaggaacagaatcacatggtcacccgtggcgatcaccgtatcgtcatgggcgatgatcacctcttcgtcacggatgatcgcgccaatggtggtgcccggcggcaagccgatatcgcggatggccttgccgatcaccttgctcgacttcgagtcaccgtgggcaatcgcctcgatggcttccgccgcgccccggcgcagggagtgcacgctgacgatatcgccacggcgcacgtgggcgagcaaggtgccgatggtcgccagttgcgggctgatggcgatgtcaatatcgccgccctggatcaggtccacgtaggccgggttgttgatgatggtcatcaccttcttagcccccagccgcttggccagcagcgacgacatgatgttggcttcgtcatcgttggtcagcgccaggaagatgtcggcgtcggcgatgttttcttccatcagcaggtcgcggtccgaggcgctgccttgaagtacgacggtgctgtccagggtgtcggacaaatgccggcaacgtgccgggctcatctcgatgatcttcacctggtagcggctttcgatggcttcggccagacgctcgccgatctgcccgccgccggcgatgacgatgcgcttgtaggtctcatcgagacggcgcatttcgctcatgaccgcgcgaatattcgccttggcggcgatgaaaaacacttcgtcgtcggcctcgatcaccgtatcgccctggggcaggatcggccggtcacgccggaaaatcgccgcgacgcgggtttccacattcggcatgtgctcgcgcagctggcgcagttgctggcccaccagcgggccgccgtaataggcctttaccgcgaccagttgcgccttgccgccggcaaagtcgatcacttgcaaggcgcctggaatttcgatcaggcgcttgatgtagtgggtcactacctgttccgggctgatcagtacgtcgacgggaatcgcgtcgttgtcgaacagcccggcacgggtcaggtaggccgcttcgcgtacgcgggcgatcttggtcggggtgtggaacagggtgtgggcgacctggcaggcgaccatgttggtttcgtcgctgttggtcacggccaccagcatgtcggcgtcatccgcgccggcctggcgcagtacggtcgggaacgacgcgcggccttgcacggtacggatgtcgaggcggtcgccaaggttgcgcaggcgctcggcatcggtgtcgaccacggtgatgtcgttggcttcgctggccaaatgttcggccaacgtaccgccaacctgccctgccccaaggatgatgattttcatccggtcactcccttaaaaccattcagccgcgcgcggcggcgatcttgatcagtttggcgtagtagaagccatcgtgtccgccttcttgcgcgagcaactggcggccgtggggctgcttgatgccggccgtggtggcgaggtccagctcccgtgcaccgctggtgcgggcgaggaaggcttcgatcacctcggtgttttccgtcggcaaggtggagcaggtggcatagagcaggatgccgccgacttcgagggtcggccaaatcgcgtcgagcagctcgccctgcagcacggccagggcggcgatgtcatcggtttggcgggtgagcttgatgtccggatggcgacggatcacgccggtggcggagcacggtgcgtcgagcaggatgcgctggaacggtttgccatcccaccaggtggcggtgtcacggccatcggcggcgatcagctcggcgttgaggcccaggcgggcaaggttttcccgtacgcgcaccaggcgtttggcttcgaggtcgacagcgacgacaccggccaggtctttttcgacttccagtatgtgacaggtcttgccgcccggcgcgcagcaggcgtcgagtacgcgttggcccggcgccaggtcgagcaggtcggccgccagttgcgccgcctcatcctgcacgctgatccagccttcggcaaagcctggcaggctgcgcacatcggtggccgcttccagtacgatgccgtcgatgctgtatacgcacggtgtggcgttgaagccggcgtcggtgagcaatttcaggtaggcatcacggctgtggtggcggcggttgacccgcaggatcatcggtggatgcgcattgttcgccgcgcagatggcttcccactgttcgggccagaacgccttcagggatttttgcagccagcgcgggtgggcggtgcgcaccaccgggtcatgttccagctcggccagcagcgcttcgctttcgcgctgggcgcggcgcagcacagcgttgagcagggccttggcccacggctttttcagtttgtcggcgcaaccgactgtctcgcctatcgcggcgtgggcgggtacacgggtgtagagcaactgatagaggcccaccagcagcagcgcttccacatctgcatcggcggccttgaacggcttttgcagcaacttggctgccagtgcggacaagcgtggctgccagcgggcggtgccaaaggccaggtcctgggtgaaaccgcgatcgcggtcttcgaccttgtccagctgggtcggcaacgaactgttcagcgacgccttgccgttgaggacggcggcgagagccttggcggcggctagacgtgggttcattgggctgtcccgaggagggtgcctatagcaaatttctcacgacggctgttgaacaaatcgctgaaattaagcgctttgccaccgggtaattgcagacgggtcaggcacagcgcctgctcgccgcaggcgaccagcaggccgtccttgctggcgccgatgatctcgccgggagcgcctttgccctcgacgagtttagcggccaacactttcacggcttcgccattgagggtgctgtggcagaccggccaggggttgaaggcacgtaccaggcgctccagctccacggccgggcggctccagtcgacgcgcgcttcgtctttgttcagcttgtgggcgtaggtggccaggctgtcgtcttggacttcgcctgccagggtgccggcggccaggccggcgatggcctcgatcacggcgggcgggcccagctcggcgaggcggtcgtgcaggctgccgccggtgtcttcgccggtgatcggggtggtgaccttgagcagcatcgggccggtgtccaagcccgcctccatgagcatcacggtcacgccgctttcgctgtcgccggcttccaccgcgcgctggatcggcgccgcaccgcgccagcgtggcagcagcgaggcatggctgttgatgcagcccaggcgcgggatatccagcaccccttgcggcaggatcaagccgtaggccacgaccaccaacaggtccggcttcagcgccgccagttccgcctgggcgtcggcgttgcgcagggttggcggttgcagcacggggatgttgtgctccagcgccagttgcttgaccgggcttggcatcagtttttgcccgcgaccggccgggcgatccggctgggtgtacaccgcgacgatgtcataagggctggcaagcagggccttgaggtgttcggcggcaaattctggagtgccggcaaaaacaatgcgcagtggctcggtcatgggaggtctcggttaaaagcagtcacaaaagaaaaaggcttgccgcagcaagcctttggaagaagggcatcaagcttgctggcgatgctttttttccagcttcttcttgatccggtcgcgcttgagcgtggacaggtaatcgacaaacagcttgccgttgaggtggtcgcattcgtgctggatgcacaccgccagcaggccttcggcgatcagctcgaacggcttgccgtcacggtccagggccttgatcttcacgcgcagcgggcgctcgacgttctcgtagaactcgggcaccgacaggcagccttcctggtactcacccatctcgtcggtcagtggttcgaactctgggttgatgtacaccctcggttcgctgcgatcctccgacaggtccatgaccacgacgcgctgatgcacgttgacctgggtcgcggcgaggccgatgcccggggcttcatacattgtttcaaacatgtcatcgaccaactgacgaaccttgtcgtccactacggccaccggcttggcgatcgtgcgcaggcgcgagtcgggaaattcgaggatgtttaaaatagccataagcgtaattgctgcacatgtgaggtaaaggcaaatcggcgttgggatggacccagacagccggtgtgaaacgccccgaagccgcgaaggccctggcatttcacgcgaacgcacataataaaggagattcaccccatgaggaaatcgctactcgtcttgctgctgtgggccccgttcgccatggccctgctgccccagcccgtccagcgcctggatcaatcgacacaacaggccatccagcgctttttactgcacaaccgcattcttgattcgccacaggacctggacagcgcgccgtacattgttgccgctgatgcaggtcgagtgctgggggccaacggtgagcgggtgcatgccaggggcaacctggacccttcccaaccccattacggaatattccgacgcggcaaggcctacaccgatccgcagacccaagaactactgggcatcaacgccgacgatatcggcacggcccgtttcgtcacggctggcgacctcaccaccctggccgtgcagcgagtgacccaggaggtgcgcccgggtgaccgcctgctacgcgcgcaatctcctgtcgatccggccacccttgaggtcatttcagcggcacccttcatcgacgggcacatcatcgatgtccccaagggtgtcacccaaatcggcgtactcgatgctgtcatcctgaacaaaggccgccgtgacggcctggtcgaaggtcaactgctcagcgtgatcaaggctggcgcgaccgtgcgcgacagcctcaccggcacgccgacccgactccccgatgaacgcgccggcaccctgctggtatttcgcacctacgaaaagctcagttacggcctgatcctcaatgcctcgcgacccctggcagtgatggaccgtttcgagactgcgcatcaaacacaatgaataggttgctaaataagttaccaacagagttatccacagcttgttccggtcaaggatgatcaaatgaatccgataaacagtcatgaagtatccccgtcagaactggaagcccgactacgcttgcacaggctgccggaactgggccccaagcgttttcgcttattgatcgaagcgttcggctctgcgtcaaaggccatcagtgcccccgccagtgcctggcgttcgctggggttgccggccatcagcgccgatgcccggcgcagccatgaaatccgcgagggcgccagtgcggcattggcctggctggcttgcccagcccagcatttgctgatgtgggaccagccggagtaccccgcactgctcgcccagattgacgacgcaccgccgctgttattcgtcgctggtgaccctctgatcctggaaaaaccgcaactggcgatggtgggcagccgacgtgcatcccgtcctggcatggacaccgcagctgcgttttcccgtagcttggcgagcgcgggttttgtcatcaccagtggcctggccttgggtattgacggcgccgcccatcaagccgcattggacgtgggcggccagacaatcggcgtcctcggcaccgggctcgaaaatttttatccacagcgccaccgacggctggcggcggcgatgattgaccaaggcagcgcggtggtttccgagtttccgctggacgctccaccccaggccggcaacttccctaggcgtaaccgcatcatcagtggtctgtcccttggcgtattggtggtggaagccagcatggccagcggctcgctgatcaccgcaaaactggcggccgagcagggacgcgaggtgtacgcgattccgggctccatccatcatcccggcgccaagggttgccatcagttgatccgcgatggtgcggtgttggtggaaaccatcgagcacattcttgaaggcttgcgcggctggcaggcgctgtcccgtccggcgccgatgccggtgacccatccgctggtggcactgctgcatgcggcgccgcacaccagtgaagcgctggcgattgccagcgggcggccgttgtcccaggtgttggcgacgcttacggagctggagcttgagggccaggttatctgcgaaagcgggcgctggcttgcgcgctgctaggttttgtaacgaagatcggtaaactgcgcagagctttagtctggagagtgaataatggtcaaccggtggcgtgtgctggaaaccgcacgagaaattcgcgcaggcgcggtgattgcctacccaaccgaagcggtttggggcctgggctgcgacccgtggaacgaagaagcagtagaccgcttgctcgccatcaagaatcgctcggtggacaagggcctgatcctggtggcggacagcatccgtcagttcgactttctcttcgaagacttcccacaggattggatcgaccgcatggccgccacctggcccgggccgaatacctggctggtgccccatcaggacttgctgccggaatgggtgacgggtgtgcatgacacggtggcgctgcgggtgactgaccatccactggtgcgggacttgtgctcgctggtggggccgttgatttccacctcggccaaccctcagggtcgcccggctgcacgtacgcggatacgcgtggagcaatacttccgtggccaggtggacctggtgttgggcggcgccctgggtgggcgcaaaaaccccagcctgattcgtgacctggtgaccggcgaggttgtgcggccttcctgaaggaaggccacagggctgcttaaggcagcagaatggtcgaccccgtcgtgcggcgtgccgataactcggtctgcgccttggccgcttctgccagcgagtaccgctggttgatatcaatgcgcaccttgccgctcttgatcatcgagaacaggtcatcggccatcgcctgcaggttctgcgggttgttggcataggtcgccagggtcggccgggtgacatacagcgagcccttggctgacaggatccccaggttcaccccatccaccgcgcccgacgcattgccgaagctcaccaccaacccacggggcgccacgctgtccagcgaggtcagccaggtgtccttgccaacaccgtcatacaccaccggtacctttttgccgtcggtcaattccagcacacgctgtgcgacgttttccttgctgtagtcgatggtttcccaggcgccgagggatttggccagggcggccttttccggcgagctcaccgtaccgatcagcttcacgcccaaagccttggcccactggcacgccagggagcccacaccaccggctgcggcgtggaacaggatggtttcaccgcctttgagttcataggtctggcgcagcagatactgcacggtcaggcccttgagcatggcgccggcggcctgttcgaagctgatgtcgtccggcaggtgcaccaggttggcggcgggcaacacatgcagttggctgtaggcgcccagcgggccactgccgtaggccacgcggtcgccgaccttgaattgggtgacttcactgccgatggcatcgaccacaccggcgccttccgcgcccagccccgatggcaaggccggcggcgcgtacaggccgctgcggaaataggtgtcgatgaagttcaggccgatcgcctcgttgcgcacgcgaacctgttgtgggccaggctcggccggcgtgtagtccacatactcaagcacttcggggccgccatgggcgctgaactggatacgtttggccatctgcacttctccttaaggtcgaatcgcgtagccccctatcggactcctaagcttgatcttcgtcaactgcgacgtacgtgggtgcggtggtatcctgtgcgcccatttgccgccgacgcccaatggcctcgcgtagctttgcccgattcaaggtgatgccatgactacccgcaccgaggctgtaaaggcctacctgcttgacctgcaagaccgtatttgcagcgccctggaaaccttcgagacggacactcgctttatcgaagacgcctggacccggcctgccggcggcggcggtcgcacccgtgtgattgcaaacggttctgtcatcgaaaaaggcggcgttaacttttcccacgtctttggcagcggcctgccaccgtctgccagcgcgcatcggcctgagctggccggtcgcggtttcgaggccctgggtgtgtcgctggtgatccacccgcataaccctcatgtgccgacttcccacgccaacgtgcgctttttcatcgcagagaaagaaggcgaagagccggtgtggtggttcggcggtggcttcgacctcacgccttactacggcaacgaagaagactgcatccactggcaccgcgtggccgagcaggcctgcgcgccgttcggtcctgaggtgtattcgcgctacaaagcgtggtgcgacacttacttccacatcaagcaccgcaatgaaccgcgtggtatcggcggcctgtttttcgatgacctgaacgagtgggacttcgacacctgcttcgccttcatccgtgccatcggtgatgcctacatcgacgcctacctgccgatcgtgcagcgccgcaaggccattgcctacaccgagcaacagcgcgaattccaggaattccgccggggccgctacgttgaattcaacctggtctacgaccgtggcaccttgttcggcctgcaatcgggcgggcgtaccgagtcgatcctgatgtcgctgccgccgcaagtgcgctggagctacgactggaaggccgaggccggcagcgaagaagcacgcctcactgactacttcctgcaagaccgtgactggctgggccttgccgcgcccaaggcggttgtgtgatggaccgctatgtcgtgttcggcaaccccatcggccacagcaagtcgccgctgatccaccgcatgttcgccgagcagaccggcgagcaactggactacagcaccttgctggcgccgttggaggattttaccggctgtgcccgtgagttctttcggcagggccgtggcgccaacgtcacggtaccgttcaaagaggacgcctaccgactggccgacaccctcaccgaacgtgcccaacgcgccggcgcggtgaacaccttgagcaagctggcagacggcagcctgttgggcgacaacaccgatggcgccggcctggttcgcgaccttatcgtcaacgccgggttgagcctgcaaggcaaacgtatcctgctgctgggcgcgggtggcgcggtgcgtggcgcgttggaaccgttgctggctgagcaacccgcctcgctgatcatcgccaaccgcaccgtggaaaaggccgaactgctcgccgagctgttcgacgacctcggcccggtatccgccagcggtttcgactggctgcgtgagccggtggacgtgatcatcaacgccacgtccgccagcctgtcaggcgatgtaccgccgattgcgggcagcctgatcgagccaggcaagaccttttgctacgacatgatgtacgccaaggagccgaccgcgttctgccgttgggcgactgagcaaggtgcatccgtggcgatggatggcctgggcatgctggtggaacaggcggcggaagccttcttcctgtggcgcggcgtgcgcccggattcggcgcctgtattggctgaacttcgccgccagttgatctgacacggatccaaatgtgggagggggcttgccccctcccacattgttgatcgttttcagtcttggaactggatggggcaattgtcggccccttccagctttctcaactcttccaccacctgcggtctggcccggcgcagcgtcaaactgcgccctaacccacgcaagcgccgagcctcctggtgcagcatctccacccctgaatagtcgataaagttgatctgctgcgcctcgatcaccacgcgctcgccctgcagactttgcaggcgcacttgcaggtaatggctggccccgaaaaagatcgagccgcccacccgcagtacatcctcatcgccgtctcgccactgttgtacccgtggctgggaggtgcgcttgaggtagaaaaacagcgacgccagcaccccggcataaatcgccgtttgcagttccagcagcaaggtggccacacaggtcaggctcatcaccacaaactcggcgcgactgacgcgaaacaacgcccgaataccgcgacggtccaccagcccccaactgatcagcaggatgctcgcggccatgctcgggatcggaatgtgggcgatcagcgctgcgccaaataacgcgaacaatgccacccacaacgcggaaaacaccccggccaacggcgagcacgcgcccgcctcgtagctgaggccggagcgggtgaacgaaccggcggacaagtagccggagaaaaatccgcccgcgatattggatagaccctgcgcacggacttcctggttggcgtcgagcaattgctgtgagcgcgccgacaacgagcgggcaatcgacaggctggttaccaacccgagcatgcccaccgccacggcactcggcagcaggcgcaggagcaggtccaggtccatcggcagcgggctgaacggcggcagtttgccgacaaacgaactgaccagcgctacgtgcccgaacatcgccggccacagccacgccaccaggctgcccagtgccagcgcaatcaacagcgttggccagcgaggcaccaggtatttgagcagcgcgccgaccagcaacgtgccaagccctagcaggagggacgcatggtcccattcgccgctgtgatggatcagcgccaacaggctattgatggcggtggcctggcttggcagatccagccccaacaggttgggcaactggccgagggcgatcaccacggcggcgcccagggtgaagccgagcaccaccgagtgggagacaaagttcaccaacgcgccgaagcgcaacatgcccaacagccactggaaaacgccggcgaggaaggtcagcagcaggatcagggtgatgtagtcctgtgaccccggcacggccaatggactgacgctggcgtacagcacaatggaaatcgccgccgtgggcccgcagatcaagtgccaggacgagccccagaggcaagcgatcagtaccgggatgatcgcggcgtacaggccgtattcgggtgggagaccagcgatcagcgcgtaggcaattgactgtggcagggcgaggactgcgccgctgaggccgacgattgcatcccgaccgacgctggcgcgggtctggcgcgggagccaggcgaggaaggggaacagtgattggcggttgggccggggcatcgcagactcggtttagaggtttggcacagaatatcagtacacatcggttcctgtgggagggggcaagccccctcccacatttgaattgcatcaggcctcagagtctggctttaactgcagggagtgcgtctttgccgtccagtgtttttacaccctccagccacttatccaataccgccggattggccttgatccacgccttcgccgcatcggcattgctgactttgttgttggccacctcggccatgatgccgttctccatctcctgggtaaaactcaggttggtcagcagttttcctacgttcgggcaggcctgtgcgtaacccttgcgggtcaaggtatacacgctgccagtgtcaccaaagtatttctcgccacccttgaggtagcgcattttcaactgcacgttcatcgggtgtggggtccagccgaggaaggtgacgaatttctgtttcttcaccgctcgcgacacttcggccagcatcgcctgttcgctggactcgaccagcttccactggctcaggtcgaagtcgttcttcttgatgatttcctgcaacgagatattcgccggcgcgccggagccgatgccgtagatcttcttgtcgaacttgtcggcaaacttgttcaggtcggcaaaatcatgcaccccggcgtcccacacatagtccggcacggcgagggtgaactcggtgccgtcgaggtttttcgccaactgcaccacatcgccattggccacgaacttgtcgtagaagccctgctgcgccggcatccagttgccgaggaacacatccacctggccgtccttgagcccgccaaaggtgatcggcaccgccagggtgtccaccttcggtttgtagcccatgccggtcagcaggaaaccggtgatggcgttggtggctgcgatatcgctccagcccgggtcggccatttttaccgtttcacaactggcgtccgcgtacacgttggcgctggtcagtaccaacaggctcaacatcacagtcaacttttgcatggccttccctctgtatttattggttttggcagggttgtggaaaacgtgccttgcgctccaggtcgtcgaggtcgatatggttgcgcatgtattgctgactggcgtccaccagtggctggtgatcccagctcttcagcttgccctgggtgagtgcctcgaataccaggcgacgacggcgttggctggcgagcacctgttggtggatcgccgggatgtcccatttggcccgcgcctcagttaaaaacgcctcgaacagtggccggtgttccggtgactggctgaggttctcccgctcgtgcgggtcgttgtgcacatcgaacagtagacaagggtcgtcttcgctgtagatgaatttgtaggcgcctcggcgaatcatcatcagcgggctgatagtgccttcggccatgtattcgccgaacacttcgtcgtgcccgccctgcccttgcaagtgcggtaccagcgagcggccgtccagcggcaggcgtgggtcgagctcgccgccggccagttccaccagggtcggtagcaggtcggcggtggacacggcgtgggtcacgcggcccgccgcgaattgccccggcgcgctgatcaatagcggtacgcgggcggccatttcgaaccagtgcattttgtaccagagcccgcgctcgccgagcatgtcaccgtggtcgccagagaaaatgatgatggtgtcatcggccaagccggtgtcttccagggtctgcaggagcttgccgacattgctgtcgatgtagctgcacgcgccaaagtaggcacggcgcgcatcgcggatcttatccaccggcagcggcttgtcccacaggtcgtagaccttgagcaggcgctgggagtgggggtcgagatcgctttgcgcgggtgttgtaggcaacgggatatcagcgtcgtcgtacaggtcccagaacggcttgggaatggtgtacgggtcgtgcgggtgggtcatcgacaccgtcaggcagaacggttgttcgccgtcttcgcggatatggtcgaacaggtattgctgagccttgaagaccacctcttcgtcgaaatccagctggtttgtgcgcacgcacgggccggcttgcagcaccgacgacatattgtggtaccagctggggcgtacgtccggctcgtcccagttcaccgcccagccatagtcggcggggtagatatcgctggtcaggcgttcttcgtaaccgtgcagttggtcggggccgcagaagtgcatcttgcccgacagcgcggtgcggtagccgaggcggcgcaggtagtgggcgtaggtcggtacatcggcggggaaatcggcggcgttgtcgtaggcgccgatcttgctcggcaactggccgctgaccagggtgaagcgcgacggtgcgcacagcgggctgttgcagtacgcggcatcgaacaccacaccctgttcggcgaggcggctcaggttgggcaatttgatcggggaaggtccgtagaacggcagcatcggcgcggccatttgatcggccatgatgaaaagaatgttcttgcgcttcatgatctatcggcattccataggcggtgtttatgcgaatgagcatgcagcccatgaaaagtggggtaaagcccatgaaaagcaatgtctaggataagcaccgcttatgtatgaagcccttggcgacctgtccctcgatctgctgcgcgcgttcgaagcggcggcacgccaccgcagttttaccgccgctgcaatggaactgggcaccacccagcccgcgatcagccagcagatcaagcgcctggaagagcaactggcgatccgcctgtttgatcgcatctaccgtggcattgagttgaccgatgccggcgccctgttgttcgagcatgtgcagggcggtttgcagggcatcaaccagggactgagcctgatcagccagcaggatcagcatgaagtgctgcaagtagccaccgacttcgccttcgccgcctattggctgatgccgcgtttgcaccgcttccaccaggccaacccccaggtggacgtcagcctggtgaccagcgagcgcaaccacgcgaccttgcgcagcgatatcgacgtggcggtgctgtttggcgacggccgtttcaagcagggcgacagcctgtggctgttcaacgaggaagtgttcccggtgtgcagcccgcaatggctgaaggcgcaggccacgccgctgactgtacaaaatctgcatgattttccgctgctgcacctgcgccaggaaaacaacagccagtggttcgactggagcggcgtgtttcgcgaactgggcatcaccaccgcgcccacccccggccagttgcgcttcgataactacaccctgttgatccaggctgcgattgccggccagggcgtggccatcggctggcgccatctggtggacaacctgctggaacagaactggctgtgccggccggtgagcgacacggtgatctcacgtttcggctattacgtggtgcaaccccagcgcaaacgccgagggcagttggtggagcgtttcgtcgactggctggtggccgagcaggccagcagcgcacagtcactgaccgggctggccctgccgtcgattgcggtctagcatctggcgcatattggatccggagctcgtcatgcaacgtatcaagggctatcacgcccatatctacttcgacgcgaacactatcgaacaggcgcgcaccttgtgcgaagacgccgccaaactgttcccgctgcgcatgggccgtgtgcaccaacggccggtagggccgcacccggactggagctgccagttggcgttcgacccggaatacatcggtgtggtgctgccgtggctggtgatccatcgtaatggcctggtggtgttcctgcaccccgataccggcgatgacctgaaggaccacacggactatgccgtctggatgggggcgatgcgggagctgaacttgtcagccttttcttaaagttcatccctaaatatgggatagacatttatatattgagactttctgcttcgtaggtttatattcgctgcatccgctcagaactcaggtgaagcgatgcaggcgcaattgatcgcgctcgattggggaaccagctcccttcgtgcttataaactcggccccgctggcgcagtgctggaacagcgctcgctggcgtggggcatcatgcatttgcccaatgaaccccgggacattgctggcgtgcgttgcagcgatggcttcgagttggcgttcgatgcggcgtgtggtgactggctcgacgccgagcccggtttgccggtgattgcctgcggcatggttggcagcgcgcagggctggagcgaagcggcttatcgcaatacccctgtcgatgtcgccagcctcggccaggcgctgcataaggtgcgcagcctgcgtggcgtggacgtgcatatcgtgccgggcgtgatcgagcaggtcggcttgcccaacgtgatgcgcggcgaagaaacccaggtgctgggcgtgttgcaggggctgggcaccgacgcattgatcggcctgcccggcagccattccaagtgggtggaggtggtcgatggctgcatcacccacttcgacaccttcatgaccggcgagctgtttgcggtgttgagcaagcacagcatcctcggacgtacccagcaacaatccgcacaattccaggccgacgcctttgaccgaggcgtgcaggtggcgctgtccaaagacggccagcgcggcgtgctgtcgacgctgttcagtgcgcgcaccctgggcctcaccgccgaactcagccccgaacagcagcccgattacctctccggcttgctcatcggccacgaactcgccggcctgcccggcagtgcccgacacaagccgatcatcctggtcggcgccgggcccctctgcgcccgctatcaacgcgccctcgccctctgcggtttcgcccacgtcagcctggcgcaagaagccaccgagcgcgggctgtggcaattggcgatggcgtccgggctcactcaacctgtattggaggcctgacatgctcaagcacgcactcgcgcaaaacggtttgatcgccatcctgcgtggcattcgcccggacgaagccgaggccgtcggccaagtgctgtacgaggcagggtttcgggtgatcgaagtcccgctgaactcgcccgacccttacaccagcatccgcaccctgcgcgacagcctgcccgccgattgcctgatcggcgccggcacggtgttgctgcctgagcaggtcgagcaggtgaaggcggccggtggccaggtgatcgtgatgccccacagcgatgccaaggtgctgcgagcggcgaaagccgcaggcctgttcctgtcgccaggtgtggcgacaccgaccgaagccttcgccgcactggccgagggggctgatgtgttgaaactgttccccgccgagcaaatgggcccggcggtgatcaaagcgtggctggcagtcttgccggctggcaccttgctgctgccggtcggtggcattaccccggacaacatgcaggtgtttatcgatgccggtgccaaagggttcgggctgggttccgggttgttcaaaccgggtatgacagtggatcaggtagcgagccgtgcccaggcttatgtcgccgcctggaaagccctgagctgacatcaagttccgcgcccttggcgccgcatctataagagagacaagagatgaaaattaccaaactgacgacctttatcgtcccgccgcgctggtgcttcctcaaggtcgagaccgaccagggcgtgaccggctggggtgagcccgtggtcgaaggccgcgcccataccgtggcggctgccgtcgaagagctgtccgattacctgatcggcaaagacccgcgcaatatcgaagacatctggaccgtgctctatcgcggcggcttctatcgcggcggtgcggtgcacatgagcgccctcgccggtatcgaccaggcgctgtgggacatcaagggcaaggccctcggtgtgtctgtcagtgatctgctgggtggccaagtgcgcgacaagatccgcgtgtactcgtggatcggtggcgatcgcccggccgacaccgcccgcgccgccaaagaggccgtggcccgaggctttaccgcagtgaagatgaatggcaccgaagaactgcagttcgtcgacagcttcgagaaagttgacctggccctggccaacgtcgccgccgtgcgcgatgcggtcggcccgaacgtcggcatcggcgtcgacttccatggtcgggtgcacaagccgatggccaaggtgctgatgaaagagctggacccgtacaaactgatgttcatcgaagagccggtgctcagcgaaaactacgaggcgctcaaagagctcgcgccgctgaccagcacgccgattgccctgggcgagcgcctgttctcgcgctgggacttcaagcgtgtgctcagcgaaggctacgtggacatcatccagcccgatgcttcccacgcgggcggcatcaccgaaacccgcaagatcgccaacatggccgaggcctacgacgtggccctggccctgcactgcccgctgggcccgattgccctggcggcatgcctgcaactggatgcggtctgctacaacgcgtttatccaggagcagagcctgggcattcactacaacgagagcaacgacctgctcgactatgtgcgcgaccccggcgtgttcgactatgaccagggcttcgtgaagatccccaacgggccgggcctgggcatcgagatcaacgaagaatacgtgatcgagcgcgcggccatcggccaccgctggcgcaacccgatctggcggcatgccgacggcagcttcgccgagtggtaagcaccctgtaggagccgggatgccggctcctgcaagccctcaataaacataagaagaggcaacccccatgcaccctgaatccttcaccgggcaggcttctttagtcacgcctaccaaaaagcgttttttcatcatggtgctgttgttcatcaccgtggtgatcaattacctcgaccgcagcaacctgtcgattgccgccccggcgctgaccagcgaactgggcatcgacccggttcaggtcgggctgatcttctccgcgttcggctggacctacgcagccatgcagatccctggcggctggctggtggaccgcgtgccgccgcgcattctctatacggctgcgctgatcctgtggtccatcgccaccgtgatgctaggtttcgctgccagctttatcgcgttgttcgtgctacgcatggcggtgggtgccctggaagccccggcgtatccgatcaacagccgcgtggtgaccacctggtttcccgagcgcgaacgcgccacggcgattggcttctatacctccgggcagtttgtcgggctggcgttcctcacgccggtactggcctggctgcaacatgctttcggctggcacatggtgtttgtcgttaccggtggcgttggcatcctgtgggggatcatctggtacgcggtgtaccgcgagcccaaggacttcaaaggcgccaacgctgctgaaatcgagctgatccgcgaaggcggtggcctggtggacatgcaggaaaaagccgccaaggcaccgttcagttgggtcgacctggggatcgtgctgagcaagcgcaaactctggggcatctacctggggcagttctgcctgaactccacgctgtggttcttcctgacgtggtttcccacctacctggtgaaatatcgcggcatggacttcatcaaatccggcctgctggcatcgttgccgttcctcgcggcgtttgtcggcgtgctgtgttccgggatcttttccgattggctgattcgtcgcggcgcatcggtggggtttgcgcgcaagttgccgatcattggcgggttgctgatctccacggcgatcatcggtgccaactatgtggactcgacggcctgggtgattgcgttcctggcggtggcgttctttggcaatggcctggcgtcgattacctggtcgctggtgtcgaccctggcaccggcccgcctgttggggctgaccggtggggtgttcaacttcatcggcaacctgtcggcgattgccacgccgattgtgatcggctttttggccagtggcgattcgtttgcgccagcgattacctacatcgcggtgctggccttgctcggagcgctctcttacgtgttgctggtgggtaaggtcgagcggatcgagttgtaaaaaagggcgaccttgcggtcgccctttttcctttcggctcagggcaccgacatctcgttacggaacacattcagcgggtcccagcgctgcttggtgcggcgcaggcggctttcaatcatgaggtcagggaagaacaccttgtaccactgcgggttgggccccttgttggggtcgccgtcgataaacagcatgtcgcggtcggggtaattgatgtagcacccttcgaactgggcattgaccggaacgccgttgtcgttggcaaatgccgcgaaaaacagtccctggatccattgcgcgtgggcttgatccgaagcgctgctttcgtcacgccagtagcattgtggttgccacttcaagtaggacgaacgctgtgcaaccgatgattcccgtcgcacggcggcgctggcctgattgatttgcccaccgaatgactggatctggatcaggctttgagtcagccgcttatcggggtcgtcccacgtcagcgtgtcccagatcgcctgcagcacagtgggggtgaaaatacccttctggtaggccgacttgtaccgaccacgctggtttggccctgagccattgagcgtctgctggcaatgcagccaatccattcgacgcgtcgcggccagggcagacgccagtgaattgatcgtcggccctggcgggttgctgcgtggcaggtgggtcgttggggaaggactcaggcattcggtagcggaaatgccgatggcattgagcatcgagctgacaaagtcctcaaagggggcttgatcattcaactcgccctgcttgtccacgtaatgaacatccatcgtgacgttgccagtgttctgatggcgcatctccagtttggttgccaggccccaggtgtccgggtttgcctggttgcgggcaaaccagtcctgataggccaccagcaatctgtcgagggctggcttggtcagcagcgaccagtcccactccagcaccagccacagcacttccttgggggcttggggcaaacgttcgaagtagtagctggtaataatcccgaactgcccgccgcctgcgccgcagcaggcggcgaacagatccagttcgtcctgttgggcgctgttgcgggcgacatgtacagggaccaggccgttgccttgggcgttcggcaccagcatgtcgacgccactcaaccaatcgcacaccaggccatccttgcgcgacagcagcccgtagccaccgccgcaaatatgcccacccagcccgaccgaatagcacgagccgccgggcaagctcgtgttggccagcttgtacagcgccacataggcatcccagttctggccgcccgcctccaggcgatagctgtagcgatgaggcgaggtgggcaccaactccgaggcaatctgccccgtggcgtcgtagaccacttggttgagttggctgatatccaggatcgagagcacttcgtcgggactgtcgggcatcttgttcgcgacaaagccttcatagcagtgaccgccgctacgcaccgtgatccggccattggggatcgccagcgcctgggcggcggcgtcgatgatgtcctgggggctatagcagaggtaaatcaagttggcgccacttgacgaagattcaccctgcacattgcccaatggccagcgcaggttgaaacctttttgcagtgttgaatgacgacggtccgcagcggtaaggagatcaaatgccatgatgtactccaaagagccaagaatgacttctgatgcggctaacttaacgaccgggagggcaaggaatgcggggcttgcgcaggcggttagacggcaataggcatgaagtgcgttgagggaggacgcaatgtccaccctcaagcctagcggaaaaaggtgaaggcgccggggggttagttgagtacgccgtcgaggatctcgtagacgatgcccgtgcccaccgcgatcagcaccacatccggccccgaacggcgccactcataacccgggtacaccggcaggcgcgcgagggcgcggttgtctaggcgttcgccgtagtaaccacggggcaacggctggccacgtaccaggcgtacattgggcggcggcggtgcgccacgggagaactggccgtggttgtcatggatgatctggcgtaccgggccgaagtcctggggcgggccgccgcgacggttgtcctgcgggccgcgatggtcgtcgccatgttgctcgtgctggccttgcgggccgccacggtcggggccgccttggtcataaggcgcggcttgcaccagcgcgctggcgccaagcaccagtacgccaaggcctgcaatcacggatttgggcattttcatcgggtattcctcagggcacgcaaacaaaaaagggacttcgaacgaggttcgaaatcccttggtcttgctgtttaggccgtgcccgcgcgggttgattcctctgtatcaggaactttacctactgcttacggggcccttacttacgggcgttacgcacgccttccgacaatgccgcacacaggctcaacacgccgtcgatggcttgctggtcattcttggcattggcaatgtgatcgatcagcgccgaacccaccaccacaccgtcggccaggcgggcgatggccgccgcttgttccggtgtacggataccaaaaccgatgctgatcggcaggtcggtgtggcgacgcaggcgggtcacggcttcttcgacgtgttccagggtcgccgcgccggcaccggtcacgccggcgaccgacacgtagtacacgaagccggagctgccgttgagcacagtgggcaggcgcacatcgtcggtggtcggggtggtcaggcggataaagtcgatgcctgcggcctgggccgggtcgcacagctcgccgttatgctcgggcggcatgtcgaccacgatcaggccgtccaccccggcttccttggcgtcggcgatgaactgcggcacgccgtatttgtggatcgggttgaagtagcccatcaacaccagcggcgtgtcgttgttgtccttacggaactcgcggaccatctgcagggttttcaccaggttctgcttggcattcaacgcacggatgttggccagctgaatggccgggccgtccgccatcggatcggtgaagggcatgcccaactcgatcacatcggcaccggcggctggcaggcccttgaggatctccagggaggtgtcatagccagggtcgccagcggtgacgaaggtcaccagggcggcgcggttttgttctttcaactgagcgaagcgggtgtgcaggcggctcatcagtgtttctcctgctgggactgttccatatggtgcatgacggtctgcatgtctttgtcgccacggcccgacagattcaccaccatcagatgatccttcggcagggtcggggcgcgcttgaacacttcggccagggcgtgggcgctttccagggctggaatgatcccttccaggcggcagcatttgtggaaggcgtcgagggcttcgtcatcggtcaccgaggtgtactggacgcggccgatgtcatgcaaccaggcgtgttccgggccgatgccggggtaatccaggccggcagaaatcgagtgggcgtcgatgatctggccatcgtcgtcctgcagcaggaaagtgcggttgccgtgcagtacgcccggtacgccaccgttgaggctggcagcgtgcttgccggtctcgatgccgtggccggccgcttcaacgccgatgatctccacgctggtgtcatccaggaacgggtggaacaggcccatggcgttggagccaccgccgatgcatgccaccaggctgtccggcaggcggccttcctgggcttgcagttggtcgcgggtttccttgccgatcacggcctggaagtcgcgcaccatggctgggtacgggtgcgggccggccacggtgccgatcaggtagaaggtgctgtcgacgttggtcacccagtcacgcagggcttcgttcatcgcgtccttgagggtgccggtgccggcgaccactgggatcacttcggcgcccagcagcttcatgcggaacacattggcctgttggcgctcgatgtcggtggtgcccatgtagatcacgcattgcaggccgaagcgcgcggccacggtggcggtcgccacgccgtgcatgccggcgccggtttcggcgatgatgcgttttttgcccatgcgccgcgccaacaggatctggccgatgcagttgttgatcttgtgtgcgccggtgtggttcagctcttcgcgcttgaggtagatcttggcgccgccacagaactcggtcaggcgctcggcgaaatacagcgggctcggacgaccgacgtaatcgcgctggaagtaggccaattcctcgttgaacgccggatcgatcttggccgcttcatattcgcgggccaggtcgaggatcaacggcatcagggtttcagcgacgtaacggccgccgaacgcgccgaacaggccgttggcgtctgggccgttgcgtagatcggtctgggactgagtcatgggacactccaggagagaatgggtgtgggaagcaatgacggccactctacccctgacgtcctgcgctgaaaaccgataagatcgccgcaacctgtcaggaaaactcacagatgagccgagaccttccacccctcaatgccttgcgtgcctttgaagccaccgcccgcctgaacagcgtcagccaggcagccgagcaattgcatgtgacccacggcgcggttagccggcagttgaaggtgctggaggaacacttgggcgtgagtttgttcgtcaaggaagggcgcggccttaaactcacagatgcgggcgctcgtttgcgcgacgccagcgccgaggcgttcgagaggttgcgggatgtgtgcgccgaactcacccagagcggtgccgacgcaccgttcgtgctgggttgctcgggcagcttgctggcgcgctggctgatcccgcgtctgggtcgtttgaacgcggacttgcccgacctgcgcctgcacctgtcggcgggtgacggtgaccttgacccccggcgccccggcctggatgccttgctggtgttcgccgagccgccctggcctgcggatatgcaggtgtatgaactggccagcgaacgcatcggcccggtgatgagcccgcgtttcgctggctacgagcggctgcgccaggcgcccgcgtcggcgttgtgtggcgaagcgctgttgcacaccacctcacgtccgcaagcctggcccagttgggcgcggcaacacggcatcgaacccggcgcgttgaaacacggccaggggtttgagcatttgtattatttgctggaggcggcagtggccgggctgggcattgcgattgcgccggaaccgctggtggtcgaagacgtgcgcgcgggtcgcctggtggcgccatggggtttcagtgaaaccccggcgcacctggcgttgtggctacccaagcgcgccgcggacgggcgcgccgggcggttggcgcagtggctcaaggcagagctgttgcgccagccggtttagtcaccgcgcttgcacagcaggtaggcggccagcaggcccagtgcgcctacggcaacaccggctgtagtccatgggtgctcttgggcgtagtcccgggtagcaacaccggtttcgcggattttgactttgctttcttcgtaggcatcgctgatcaggtggcgggaatgcttgagggcattctcggcattgcttttcagggccttcaaggttttgcgcgattcgtcagacgcatcgtccttgaggctttccagagacttgagcaggctcgaaatctcggcttccatgctttccagcgacgctttgcgtaaagaagtgttggccatgtggactctcctgaagtgattgagtggcgtgtgtagataccgactgcggccgtttcagaaagtgcagttaatctgaactttcaggtaggaatggtcgccagaagcagtacgaacattgactgctacgcttgcttaacgacccttaggagaactgccatgagtgatcatcacacctacaagaaagtcgaattggtcggctcgtcgaccaccagcatcgaagacgcgatcaacaatgctatcgctgaagccaacaagagcatcaagcatctggagtggtttgaagtgactgaaacacgcggccatatcgagaatggcaaggtcgcgcactatcaggtcaccctcaaggtagggttccgaattgccagtagttgatcgcaacggttgaacttgctgactggccgattgccataacctgcgctacaaccaatgggtgccgatgccgcaagcgtcggcacgctctttttgatcagcgcaaggaaagtaacggatgaagaagttcctgttagcggtaggtttgttgagcattgccggcacagccctggcggcgggcaagccttgtgaagagctgaaaagcgagattgcggcgaaaatcgacgccaggggcgcttcgggctattcgttggaagtggtggataaaggcgcttctaccgacgctaaagtggtcggcagctgcgaaggcggcaccaaggaaattgtctacaagcgcggttaatcccgtgttccagacataaaaaaccgacgcgagtgcgtcggttttttttcgcttgagggtttcagcccttcatcaactgcgccagcaactcgtaggaatgaatccggtcggcgtgctcgtacaggtcgcaggtaaagatcagctcatcggcgccggtttgttcgatcagcacctccagcttggcacggatcttcgccgggctgccgaccatggccaggccgaggaagctgccgaccgcgtctttttcatggggcagccacaggccatccatggttttcaccggtgggcgctgcaccaggctttgcccgcgcatcagggcgaggatgcgttggtagaccgaggtggcgaggtagtcggcttgttcgtctgtgtctgcggcgaccagcggaataccgagcatcacgtagggtttgtccagcacggccgaaggcttgaagtgattgcggtatacgcgaatcgcctcatgcatcaggcgcggtgcgaaatgcgaggcgaaggcgtagggcaaaccgcgttcgcccgccaattgcgcgctgaacaggctggagcccagcagccacaccggtacgttggtgccggtaccggggacggcgatcacccgttggtcgggggtgcgtgggccgaggtaggccatcagctccgccacatcttcggggaaatcgtcggcactgcccgagcgctcacggcgcagggcgcgggcggtcatctggtcggagccgggcgcgcggcccaggcccaggtcgattcggccggggtagaggctttccagggtgccgaactgttcggcgatcaccagtggcgcatggttgggcagcatcacgccgccggagccgacgcgaatcgtcgaggtgccgccggccaggtaacccagcagcaccgaggtggccgaactggcgataccgtccatgttgtggtgttcagccacccagaaacggttgtagccgaacttttccacgtgttgggccaggtccagggaattgcgcagcgactgcgccggactgccgttggcgcgcacgggcaccaggtcgagggtcgagaactttacgtcggacagcgatttcataagcctgcttctccaaaagggccgcaggctttttagacgaaccaaaacctgccgcttcatgtgcatgctctatgcaatgagggcatatacccgagattcaatagcagcccaggaaatttcctactgaatcgctaggtttctcttacaagatgaactttgccgggccgactatcctcagaacccttactgacgcaaaaccaccgttcgaggagaccgctatgagtatcgttaaaaaagcatccgcgcattgggaaggtgacctgaagactggcctgggctccatttccacggaaaccggcgtgctgcgtgaagcgccttacggcttcaaggcccgtttcgagggcggtaagggcaccaacccggaagaattgatcggtgcggcccacgccggctgtttctccatggcgttttccatgattctcggcgatgccgggctcaaggctgacagcattgacacccaggccgaagtgaccctagaccaggttgacggtggttttgcgatcaccgctgtgcacctggtgctcaaggccaagattccgggcgcgagccaggcgcagttcgatgaactgagcaaaaaagccaaggaagggtgcccggtgtccaaagtgctgaacgcgaaaatcagcctggatgccaccctggtcagctaacgcagcaggtccaatgtgggaggggcggtgcgacgattcgacttgcccccgatnnnnnnnnnnnnnnnnnnnnnnnnnnnnnnnnnnnnnnnnnatcgggggcaagtcgaatcgtcgcaccgcccctcccacatttagttctgcgttagatcagaactcgtgttttgtcagtgtggtcctattaccatgcagcctaggcgcacactcgtgcgcagcgcattcagggagcttcacacatgaaacgttttgccttggcaatcatctgcggtgtattggccacgtcggctgtggccgcgccaaaagactgcgaagagctcaggaaggagattgaggtcaagatccaggctaacgcggtgccgtcctacaccctggagatcgtcagcaaggaagaagccgacaagcacgacagcgccatggtggtcggcagctgtgagaacggcaccaaggccatcgtctaccagaagaacaacgactgatcagatgcagttgacgctgcgttcttctgcgagcaactgacgcgccgagtcatacaaccggatgttgggtgtgaaggccagcgagcgcccttccagcacatagcgctggccggcctggaagtggtcgtattccagggtcatgaagcaggtgcggtacatcatctggctgagcccacccaaaccgccgccggcggggacttcaaagtcgaaacgcaccatcagttcatgatggccgggcggcatttggaagaaacgtccgtcatccaggttcttgccgtccaagcgttgcgccattaccagcttggaccccggcgtcggcgtggtgaaatcaacccacgcctgctgcgggtctgccggtggcaccggggtggtggtgcaggcactgaggaacagggcggcgacgggaaaccagagctgacgcatggcaggcactcacgtaggaaagagttcagcctgatgccagcggcgacagacttcttgtaagtataaacacgtcgtgccatggaaaaattccgcctgggcgcgatagtctggcgagcaaattacccaggagcggtcggggcatggtcaggcgttttcttccagggttgatggttgtgctgctcagcggctgttccagtgtcagttattacggtcagttggccagtggtcaatggcaattgctgcgcgcccgggagccggtggcgcaggtgatcgctgacccttcccgcccagtgctgttgcgcgagcatctggcgcaatcgcaaaaggcgcgtacgttcgccagtgaacacctgcatctgcctgacaaccagagctacaggttgtatgccgacatcggccggccttatgtggtctggaatgtcttcgccacgcaggagttttccctgtctcccgaaacccattgcttccctatcgcgggctgtgtggcctatcgcggctactacaaccagggcgcggcgcgtggtgaggcggcgttgttgaagcagcgaggcatggacgtgtcgatcggcggtgtcgaggcctattcaaccttgggctggttcaacgacccgatcatgaattcgatgatgaactggggtgatgagcggctggccacgttgatcttccatgagctggcgcaccagcgtttctatgtgaaggacgacaccgagttcaatgagtcgtttgccaatttcgtcgagcaggaaggcacgcgccagtggcgtgctgcacggggcttggcgccgcagagcctgtcggcgtcgaagcagcgtgatgagttcattcagctgatcctcgatacccgccagcgcttggaaaaactctatgcccaacccttggcaactgatgtgatgcgccaggcgaagtcggccgagttcgagcgtctgcgtcgcgattaccggcagctgcgcgacagccagtggggcggggacaaacggtatgacgcgtggatcaaccaacccatgaacaatgcgcggttgctaccgtttgggctgtacgaccagtgggtgccggcgtttgcggcgttgtttgcgcgggaaggtggggattgggtgaggttttataaggcggtggagaagctgggtgggttgccggtggtgcagcgcaaggcggcgttgaggcagttggaaaggggtgctctttagggcctcatcgggggcaagtcgagtcgtcgcaccgcccctcacacattttgaccgtgtgcgccggtcaattgtgggagggggcttgcccccgatggcggtctcaaagtcgctgcaaaaacgcctgatgcatctgatccagcgtttcaaaatgccaggtcggcgcctcggcattcagttcctcgaaactaccaaacccataccccaccgccgccgaatccagcccattcttgtgcgcgccgatcaggtcatgcttgcgatcaccgatcatcaaggtggtggccgggtccaggccttcctcgctcatcaggtgggcaatcagttcgactttgttggtgcgcgtcccgtccagctcgctgccgtagatcaccttgaagtgcttggcgaaatcgaagtgccgggcgatttcgcgggcgaagacccagggcttggaagtggcgacatagagctggcggccttgaccgttcaacgcttccagcagcggcatcacgccgtcgaacacacggttctcataaagcccggtgaccttgaaacgctcgcgatagaaattcaccgcttcccaggccttggcctcgtcgaagccgtagaactgcatgaacgcttgcagcaagggcgggccgatgaagtgttcgagtttggtcaggtccggctcgtcgatccccagcttgccgagggcgtactggatcgagcgggtgatgccctcgcgtgggtcggtgagcgtgccgtccaggtcgaacaggacggtttggtaaggcagggtcatcggtcgaatccttcagccaggtgcaggtctttgagcttcacgtagttcgcggcgctgtaggtgaaaaaggcgcgttccttgtcagtcaatgggcgaatctgtttgaccgggctaccgacatacaggaagccgctttcgagtttcttgcccggcggcaccaggctgccggcgccgatgatcacgtcgtcctcgaccacggcgccgtccatcacgatgctgcccatgccgatcaggatgcggctgccgactgtgcagccatgcagcatgaccttgtgggcgacggtcacgtcgtcgccgatcagcagcgggaaaccgtccgggttgaacggcccggcatgagtgatatgcagcacgcagccatcctgcacgctggtacgcgcaccgatgcggatgcggtgcatgtcgccacggatcacggtcagtggccagaccgagctgtcggcgccgatttcgacatcgccgatcaccaccgccgaaatatcgacaaaagccccggcgcccagggctggcgtgtggttctgataggtgcgaagggtcacgatagcctctctctcttctgctgatagctgcggtgggcgttgattgtaattaagatggccccatctttgttcttacatgtttcttcagccaaggtgcccaccgtgagcgcgaacaaccctcttctgcagtcctacgacctgccgccgttctcggcgatccgtgccgagcacgtccagccggccatcgaacagatcctcgccgacaaccgcgttgccatcgaaggcatcctgcaaagccagggcaaaaatccgacatgggccggtctggtcctggcgatggacgaactgaatgaccgcctgggcgccgcctggagcccggtcagccacctcaacgccgtgtgcaacagcgctgaactgcgtgaagcctacgaaagctgcctgccggcattgagcgcgtactctaccgagatgggccagaaccgcgcactgttccaggcctttgaagccttggccaatagcccggaagccgccggtttcgacgtggcgcaaaaaaccatcctggaacactccctgcgtgacttccgcctgtccggcatcgatctgccgccagagcagcaaaaacgctacgccgaagtgcagagcaagctgtcggagctgggcagcaagttctccaaccagttgctggacgcgacccaggcctggaccaaacacgtcaccgatgaagccaccctcgcgggcctgaccgactcggccaaggcgcagatggccgccgccgcccaggccaaaggcctcgacggctggctgatcaccctggaattccctagctactacgccgtcatgacctacgcccaggatcgcgcgctgcgtgaagaagtctacgcagcctactgcacccgtgcgtcggaccaaggcccgaatgccagtcagaacgataacggcgcggtgatggaacagatcctcgacttgcgccaagagctggctcagttgctgggttacgcgtcgttctccgaactgagcctggccaccaagatggccgagtccagcgaccaagtgctgagcttcctgcgtgacctggccaagcgcagcaagccgttcgccgcccaggacctgcaacagctcaaggcctatgctgccgaacaaggctgcgccgacctgcaaagctgggacagcggtttctacggcgaaaaactccgcgagcagcgctacagcgtgtcccaggaagccctgcgcgcttacttcccgatcgacaaagtgctgggcggcctgttcgccatcgtgcagcgcctgtacggcatcgagatcgccgagcagaaaggcttcgacacttggcacccggatgtgcgcctgtttgaaatcaaggaaaacggccagcacgtgggccgcttcttctttgacctgtatgcccgtgccaacaagcgcggcggtgcctggatggacggtgcccgcgaccgtcgccgcacaatcgacggcgccctgcaaagcccggtggccaacctggtgtgcaacttcaccccggccgacagcggcaagcctgccctgctgacccacgacgaagtcactacgctgttccacgaattcggccacggcctgcatcacctgttgacccgtgttgaacacgctggcgtgtctggcatcaacggcgtggcctgggatgcggtggaactgccgagccagttcatggagaactggtgctgggagccggaaggcctggcactgatatctggtcactatgaaaccggcgagccgctgccccaggacctgctggaaaaaatgctcgcagcgaaaaacttccagtccggcctgatgatggtgcgccagctggaattctcgctgttcgacttcgaactgcatgccacccacggtgatggccgcagcgtggcgcaggtgctggaaggcgtgcgcgatgaggtatcggtaatgcgtccgccggcctacaaccgcttccccaacagctttgcgcacatctttgccggcggttatgcggcgggttactacagctacaagtgggccgaagtgctctcggcggatgccttctccaagttcgaagaagacggcgtactcaacgccgaaaccggtcgtgctttccgcgaggcgatcctggcgcgtggtggctcccaggagccgatggtgctgttcgtcgacttccgcggacgtgcgccgtcgattgacgcactcttgcgccacagcggcctgagtgaggacgcggcagcatgagtgaagggcctgtgattaccaaaaagcagtttatcgccggggcggtctgcccggcgtgcagtgagccggacaaactgaagatgtggaccgaggacagcgtgccgcaccgtgagtgtgtggcctgcggttataccgacacgctgaatgatcaagggttgtcggtgcccaaggaattgggcacgcgggtcaataccacggcgttgaaagcgccggcggacccgaaggtgcaggcggtgcagtttttccccaatcccaagctgaaaaaggactgatacccgcttagggtgtcagcaccaattcagcgtctttcttgggttcgacacggctgctgccggccgtgttgagccagcttttcattgagcacagcgcgaattcactggtgctgcagtcgccatttgccaaggcggtgcgcaacttgtcgatatcagccttcatcatgtagcgaaccccgtccttgaagccgttgctggtgccaaacccgcccagggtcatttcgttcagcgcgtcttccttgctccacccctgaatcaccactcgatacatcgcggccatcaggccggtgcgatcagagccatgcttgcaatgcatcagcaccgggccgttggcttcggcgtcctggatggccctgagtgccgccagtacgtcggaatcgtcgacatggttagtgcgataagtcagctgtacccgtttgatatcagatgacttcaaccaggcggcatcagattccggcaaaaagttgatcactgtaccgatcttgagtttttccaactcaggcacggcgctgctatcgggcaaagcgctgcgatagagcgttggcgtcatttggtgcaggttgaattggttgcccactggctgggcccactcgggtgagcgaatggacgaagtctcatcggcctgggcgtgaacggcgccgagcagtgccatgaatgccaggccgagagcaggcagcaatcgagtgttggacatgcgctttgtgacccaatagggaaatggctgatggagcgcagattcgcccagggggggtcaacaccgtgtgaggtgctcgtcaaagaaacgtgaatggcctcatctgatccggtgtttttaccgctcaagcgattcgtcctgatgcttaggctgctatcatttgtaactattgtttgccggtgcctgatatcccactggcttgccacacatcacgctgctcccagaagtggcggataaacccgtgaccacatgatgaggtgccaccatgtctgatcaagatcaagacaacccccggcgtgactttttgcgcaaatccttgaccttgatcccgatggtcacggttgccagcaccggccttggcggctcgatgctgatggcaacgcctgaaccggcgcaggccgctcccgccaagcctgcgccgagtgaaaaggcctacgagcctacttacttcacggctgaggaatgggcgtttatcaacgccgccgtcgagcgcttgatccccgccgatgaccaaggcccgggtgccctggaagccggggcgccggaatacatcgaccgtcagatgaacaccccgtacgccagcggtgccctgtggtttatgcaaggcccgttcaacgcggatgctgctccagagatgggctggcagtccaaactggtacccaaggacatctatcgcctgggcattgccgcgacggatgcctggtcgaaagccttcaacggtaaaacttttgctgcgcaagacagcgctacccgagacgacatgttgcgtcgtctggaggctggcggaagtgaagtgacggcgcattttgacgcggtgccgccgaagatgttcttcaacctgttgctgcaaaacaccaaggaagggttcttttgcgaccccatccacggtggtaacaaaggcatggtcggctggaccatgatcggcttccccggcgctcgcgccgatttcatggactgggttgaacgcaacgagcaataccccttcccggcagtttccatccgtggcgagagggcttgaacgtggcgaccatcatgaagaaagtggatgcggtgatcgtcggcttcggctggaccggcgcgatcatggccaaggaactgaccgaagcaggcctcaacgtggttgcgctggagcgtggcccgatgcaggacacctacccggacggcaactatccccaggtcatcgacgaactgacctacagcgtgcgtaaaaaactcttccaggatatttccaaagagaccgtgaccattcgccatagcgtgaaggacgtcgccttgcccaaccgtcagttgggcgcgttcttgccgggcaacggcgtgggcggtgcgggcctgcattggtcgggcgtgcatttccgtgtcgacccgatcgagctgcgtatgcgcagccactatgaggagcgctacggcaaacacttcatccccaaggacatgaccatccaggacttcggcgtaagctatgaagagctggagccgtttttcgactacgcggaaaaagtcttcggcacctccggtcaggcctggaccgtgaatggtcggttggtaggcgaaggccgtggcggcaacccgtatgcaccggaccgttccaatccgtttccgttggaagcgcagaagaataccgtctccgcacaactgtttcagaaagcggctgccgaggtgggttacaaaccctacaacctgccgtccgccaatacctcggggccgtataccaatccttacggtgcgcagatggggccgtgcaacttctgcggtttctgtagcggctatgtctgctacatgtattccaaggcctcgccgaacgtgaacatcctgccggcgctgcgccaggtaccgaactttgagctgcggcccaattcccacgtgctcaaggtcaatctcgacagcaccaagagcaaggccactggcgtgacttacatcgacgcccaaggccgggaatgtgagcagccggcggacctggtgatccttggcgcgttccagttccaaaacgtgcgtttgatgctgttgtcgggtatcggcaagccctatgacccgataaccaatgagggcgtggtgggcaggaacttcgcctaccagaacatggccaccatcaaggccttcttcgacaaagatacccataccaacaacttcatcggtgcaggcggcaatggcgtggccatcgatgacttcaacgccgacaacttcgaccacggcccccatggcttcgtgggcggttcgccgatgtgggtcaaccaggctggcagccggccgattgccggcacgtctaaacctccgggcactccggcctggggtagcgcgtggaagcgcgccacggccgattactacacccaccaggtgtcgatggatgcccacggcgcccatcaatcctaccggggcaactatctggatctggacccggtgtaccgcgatgcctacggcctgccgctgctgcggatgacgttcgactggcaggaaaacgacatcaagatgaaccgcttcatggtcgagaaaatgagcaaggtcgccgaggcgatgaaccccaaggcgattgccctgctcggcaaaaaggtcggtgagcatttcaacacggcgtcctaccagaccacccacctcaacggcggcgcgatcatgggcaccgacccgaaaaccagcgcgttgaaccgctatttgcagtgctgggatgtgcacaacgtgtttgttcctggcgcgtccgctttcccacaaggcctgggctacaaccctaccggcctggtggcggcgctgacctactggtcggcgcgggccattcgcgagcagtacctgaaaaaccccggcccactggttcaggcataaggagcgatgaccatgaaagcacttgttatcgccaccttcgcccttttcagcagctgctctgtcagtgccgctgaaagcgatttgatcaagcagggtgaatacctggcccgcgccggtgactgcgtggcctgccacaccgccaaaggcggcaaacccttcgccggcggcctgccaatggaaacgccgattggcgtgatctattccaccaacatcaccccggacaagaccggcctgggcgactacagcttcgaggacttcgacaaggccgtgcgccatggcgtcgccaagagcggtagtacgctttacccggcaatgccctacccgtcttacgcgcgcgtcagcgacagcgacatgcaggcgttgtatgcgtatttcatgaagggggtcgagccggttgctcagcagaacaaggacagcgatattccgtggcccttgagcatgcgttggccgctagcggcgtggcgttggatgtttgcgccggctgtcgacgagcatcaggcgcaagccgccgctgatcctgtggtgagccgcggtgcctacctggtggagggccttggccactgcggcgcgtgccatacgccacgggccttgaccatgcaggaaaaagccctgagtgccactgacggcaacgctttcctgtccggcagtgcgccgctggagggctggatcgccaaaagcctgcgcggtgaccacaaggatggtctcggcagttggagtgaggaacagttggtgcaattcctcaagaccggccgcagtgatcgcagcgcggtgtttggtggcatgagcgacgttgtcgtccacagcatgcagtacatgtcggaaactgacctgacggctatcgcccgttacctcaagagcttgccggcggtggaccccaaggaccagccgcatcagtacgacaagcaagtggccgaggcactgtggaaaggcgatgacagcaagccgggcgcgtcggtctatatcgacaactgcgcggcctgccaccgcaccgacgggcatggctatacgcgggtgttcccggcgctggcgggtaacccggttttgcagacggcggatgccacgtcgttgatcaacatcgtgttgaacggcggcaccttgccggctacccacgcggcgccatcgaccttcaccatgccggcgttcgcctggcgcctgtcggatcaggaagtggcggatgtggtcagtttcattcggggcagttggggcaataaaggtgcgccagtgaaagccaacgatgtggcggacttgcgcaagaacgatatgcgcaccacctcgggcgatgacctgggccaggttactcaacagcactgatccctggcttaccgccaaacggcactggtcagaagccttgcgcctcgatactgtatataaaaacagtatcgaggcgctttcatgtctactccgctgccgccccgaggccggggcacggccaccaacctgcacaaccgcttcgcaccgactgtcagcgtggtggaggatgacggctggttccaggaagtgccgccgacccatggcactgaagtgcgcatcgaaacggccaagaccatcatcacccgcaacaattcgccggacttgccgttcgatcgttcgatcaacccctaccgtggctgtgagcacggttgtatctactgctacgcgcggccgagccatgcctattgggacatgtcgccggggctggatttcgaaaccagactgatcgccaagaccaacgctgccgatgtgctggaacagcagctgtcgaaaccgggttatgtgtgcgcgccgatcaacctgggctccaacaccgacccgtaccaaccgatcgagcgcgaatacaagatcacccggcaaaccctgcaagtgctgctgcgctatcgccacccggtgaccatcataaccaaggggtcgctgattttgcgcgatctggacctgctcaccgagttggcgcgccagcgactggtggccgtgatgatcagcctcaccagcctggacgacgaactcaagcgcatcctggagccacgcacggcggcgcccaaggcgcgtctgcgcgcgatccgggtgatgcgtgaggcggggatcccggtgggcgtgctgtgctcgccgatgatcccgatgatcaacgacagtgagttggaaagcctgctgaccgaagctcacgcagcgggcgcgcaaagtgcggcgtacatgatgctgcgcctgccgctggaggtggcgccgttgttcgaggagtggctggcggcgcattacccgcagcgtgcggcccatgtgatgagcctggtgcgccaggtgcgtggcggcgaggtgtatgacagccgcttcggcgtgcgcatgcgtggcgaagggccgtttgccgatttgctggcgcagcgcttcagcaaggccatcaagcggctggggctcaaccgccgggaagggtttaacctggattgcacggcgttctgtcctccgggcagacagatggcattgttgtagactgacaaggaggaatgcatcgttcctgtaggaatagtcgcgttttgacatcactgaaacccgcgatctagagcggttcattcagtttgagttaagtttcgacggttaccttgttcagcgagtgactgatgagtcggcactctggcccctggcgttttacaactaatccactggccaagcgtccaactgacctgaacactcccctgcattaatcaagaggatgaatcatgagtgacaaggataaacagccgttggctgcgtcggcttctgcccctcaggtggctgaaaccgccgatgcagcgctaaagcacattgttgacggctttttgcatttccatcacgacgtcttcccccagcaggaagaactcttcaagaaactcgccacggcccagagcccacgggcgatgttcattacctgcgccgactcgcgcatcgtgcccgagctgatcacccaaagttctccgggcgatctgttcgtgacccgtaacgtcggcaacgtcgtaccgccttacggccagatgaacggcggtgtttccacggctatcgagtacgcggtactcgccctgggcgtgcagcacatcatcgtctgcgggcactccgattgcggcgccatgcgcgcggtgctcaaccccgacagcctggaaaagatgccgacggtcaaggcctggctgcggcacgccgaggtcgccaagaccatggtccatgacaactgcgactgcgccaatgaaggcgagagcatgaaggtgctcaccgaagaaaacgtcatcgcccaactgcaacatttgcgtacccacccctccgtggcttcgcgcatggccaatggtcatttgtttatccacggttggatctacaacatcgagaccagcgaaatcagcgcctacgatgccgatcagtcgacgttccgaccgttgagcggcgacggaccgatcccttgcgcgacgcctaaagcgcgcttctaaaacacttccctgccgggtaaagcggtggctgccatggacgcagccaggctttaccgcgcccggcgaatgcctcgggagagccatcatgcgtgctgctcaattgaaagctgtattgccaagggagctgctcgcttccgtggttgtgtttctggtcgccctgcccttgtgcatggggattgcgatcgcctccggcatgccgccggccaaaggcctgattaccgggattatcggtggcctggtggtgggctggctggcgggctcgccgttgcaggtcagcggccccgcggcagggctggcggtgctggtgttcgagttggtgcgccagcatggcatgctgatgctcggaccgatcctgctgctggcgggattcctgcagctggttgccgggcgtttgcgcctgggctgctggtttcgcgtcacggcaccggcggtggtgtacggcatgctggcggggattggcgtgctgattgtgctgtcgcagattcatgtgatgctcgacggcgcgcccaagccttccgggttggataacctggcaggcttcccggcggcactggccgacgcaatcccgaccctgggcggtggcctcggctggcaggcagggttactcggtttgtcgacgatgctggtgatgtacgcctgggacaaattgcgcccgcagaagctgcgctttgtgcctggcgctttgctgggcgtgggcctgaccacggtggtcagcctggtgctggcgttgcaggtcaagcgtgtcgaagtcccggaaaacctcgccgatgctatcgactggctacgccccagcgacctgttgaacctcgccgatccccagctgttgatcgcggcatttgccgtggcgtttatcgcgagcgctgaaacgctgctgtctgccgcggcggtcgaccgcatgcacagcggtcagcgttcggatttcgacaaggaattgtctgctcaaggtgtcggcaacatgctctgcggcctggtcggcgccctgccgatgaccggcgtgattgtacgcagctcggccaacgtgcaggccggcgctaccacgcgcttgtcggcgatgttccatggcctgtggctgctggcgttcgtgctgttgctgtcgagcgtgctgcaaagcatcccggtggcgagcctggcgggagtgctggtgtacaccggtatcaagctggtggacatcaaggcgttcaaggcactgggacgttatgggcggatgccgatgtttacctacgcggccacagcgctggcaatcatctttaccgacctgctgaccggcgtattggtgggcttcgggttgacgttggtcaagctggcgttcaaggcttcacggctcaaggtcagcctgatcgacttgcctcaggacggtgagatggagctgcgcctgacgggtgcggcgacctttctgaaagtgcctgcgttgactcaagtgttgtcgacggtgcctgccgggacgaccgtgcatgttccgctgagcaacctgagttacatcgaccattcctgcctggagttgctggaggaatgggggcgggccaatgcggccaagggctcgaagctggtgattgaggcgcgcgggttgaaacgtaggctggaaggtcgggtgaggacgacgacagggattggctcagcgccagcctgaacagcaaacaacacccctttaggagctggcaagccagctcctaaaggcgggatcaggccggctgatccagcgccaactcaacccccagctgtcgcgacaggcatggccagcgcttccacgcggcttcggtgtccgggctcttgagctgctcgcgataagcctccacggactccagcgcaaagctgtcttcgttgagcatttcatccactgcgtggtgcaccgcttcatccagctggttggcgaaggcttcgccgatcagctgatgggcaatgacattggccactgtggtatcggccggaatcaacggctggccaaagtgcttgatatacagatcgttgacctcttcgaccaggcgatgagccaggtaggcctcatccagcaggccatcgagaccttcatggccggccaggatggcgggcggttgcaggaagaaatgctcggcgatcttcagtaccggcttgatctggctttcgataccggcctcgcgggccacgtcgttggcggcgtccagcaagtccgggactaggtcgatgtaggcggtgacaaagcgtgtcatgacaatgttgcgatcaccgtcagccagagatatggccgaatgcaggtgcggcaattgtttttccagttgcagggcaagctggccagtgctggcttcgtgttgatgggcacgggaaatctgctcgcgcaatgcggcggtgttcatgaaagctccagtgatgcaggcgtaggaaaagggagaagataaggtagctcgtttatacgagcgcctcagacgcatttgtcataattatttcatggttatgcgcctgcgttatatcgaattgccatcgttcgtcggataaacgattccgtgcccggttttattgactccagccagtcatttctactcatttgcccctacacattgcggggttgcagagcctgtctatactcggatttgtacgcgattagctgatgacgccagactgcataagcaggcaaggccaggcggttgtaagcagtatggaagccgctcccttcgacgcaggtgcaaaccggcgggataacaagaacgataaggggaacccgcaatgatgcgacatccacatgtttggatgggcctcctgttgtggtcggtattcggccaggcacatgccgcctggacaacgaatatggcgccaggggcgacagaagtcagtcacgctgtgttcgacctgcacatgaccattttctggatctgtgtggtgattggcatcatcgtgtttggcgcaatgttctggtcgatgatcgttcatcgccggtccacgggccaggtggcggccaagttccacgagagcaccaccgtggaaatcctctggaccgtcgtacccttgctgatcctgatcgcgatggccattccggcgaccaagaccctgatcaatatctacgacagcagtgagtcggatatcgacatccaggtcaccggctaccagtggaagtggcattacaaatacctgggccaggatgtggagttcttcagcaacctggccacgcccgccgaacagatccacaaccaggcgaccaagggcgaacattacctgctggaagtcgaccagccgctggtgctgccagtgggcgccaaggtgcgcttcctggtgacggccgccgacgtgatccactcctggtgggtgccggcgtttgcggtcaagcgcgacgccatccctggcttcgtcaacgaggcctggacccgtgtcgagaagcctggcatctaccgtggccagtgcgccgaactgtgcggcaaggaccacggcttcatgcctatcgtggtcgaggtcaagtccaaggccgactacgacacctggctcggcgagcgcaaggcagaggccgccaagctcaaggaactgacctccaaagagtggaccctggaagagttggtggcccgtggcgacaaggtctaccacaccacctgcgtggcctgtcaccaggccgaaggccagggcctgccgccgatgttcccggcgctcaagggttcgaagatcgccaccggtcctgccgccgatcacctgagcctcgtgtaccacggcaagcccggcaccgcgatggcggcattcggcaagcagctctcggaagtggacatcgccgccgtggtgacctatgagcgcaacgcctggggcaacaacaaaggcgacatggtcacgcctaaagacgtgctggccatcaagcaggcggaaagcaaatgacctctcccatggcattgacctcgacccgccccgcccactcgcttgcaggagaacggccatgagcgctgtgatcgacgaccatggtcacgccgaccatgcccacggccccgccaaggggctgatgcgctgggtgctgaccaccaaccacaaagacatcggcaccatgtacctgtggttcgcctttgccatgttcttgctcggcggctcgttcgccatggtgatccgtgccgagttgttccagcccggcctgcagatcgtgcagccggcgttcttcaaccagatgaccaccatgcacgggctgatcatggtgttcggcgcagtgatgccggcgtttgtcggcctggccaactggatgatcccgttgatgatcggcgcgcctgacatggccctgccgcgcatgaacaacttcagtttctggctgttgccggcggccttcctgctgctggtctcgacgctgttcacgccaggcggcggtcctaacttcggttggaccttctatgcgccgctctccaccacctacgcgccggaaagcgtgacgttctttatcttcgccatccacctgatgggcatcagctcgatcatgggcgcgatcaacgtggttgccaccatcctcaacctgcgtgcgccaggcatgaccttgatgaaaatgccgctgttcgtgtggacctggctgatcaccgcgttcctgctgatcgcggtcatgccggtgctggccggttgcgtgaccatgatgctgatggacatccacttcggcaccagcttcttcagcgcggccggcggtggtgacccggtgctgttccagcacgtgttctggttcttcggccaccccgaggtgtacatcatgatcctgccggccttcggcgccgtcagttcgatcatcccgaccttttcgcgcaagccattgttcggctacacctcgatggtctacgccacggcgagcattgcgttcctgtcgttcatcgtgtgggcgcaccacatgttcgtggtgggcatcccgttggtgggcgagctgttcttcatgtacgccaccctgctgattgccgtgcccaccggggtgaaggtgttcaactgggtcagcaccatgtggcaaggctcgctgaccttcgagacgccgatgctgtttgccgtggccttcgtgatcctgttcaccatcggcggtttctccgggctgatgctggcgattgccccggcggacttccagtaccacgacacctatttcgtggtggcgcacttccattacgtactggtgcccggtgcgatcttcggcatcttcgcctcggcctactactggctgccgaaatggaccggccacatgtacgacgaaaccctgggcaagctgcacttctggctgtctttcgtgggcatgaacatggcgtttttcccgatgcacttcgtcgggctggcgggcatgccgcggcgggtgccggactacaacctgcagttcgctgacttcaacatggtctcgtcgatcggcgctttcatgttcggcgccacgcagatcttcttcctgtttatcgtgatcaagtgcatccgtggcggcccgccggcgccggccaagccctgggatggcgctgaaggcctggagtggagtatcccttcgccggcgccgtaccacaccttcaccacgccgccggaggtcaaatgaacacgccttggcactgcgtacacggccaatgtgggagggggcttgcccccgatggcggtgtgtcagccgacatcatgattggctgtaaaacagctatcgggggcaagccccctcccacaatggcctcattcacattgggtgggcgtcatggctgaatccttgccgatcaagcgcctggtcacgcgcctgctgatcctggtggtggcgatgttcgccttcggctttgcgctggtgccgatctacgacgtgatgtgcaaggcgttcggcatcaacggcaagaccgccgggcagtatgagggcgagcaggttgtcgacccgacgcgccaggtgcgcgtgcagttcctgtccaccaacgccatcgacatggtctgggatttctatgccaaggcggacgaagtggtggtcaacccgggtgcggtaaccgagatgctcttcgtggcccacaaccccaccgacaagccgatgactgcccaggccgtaccgagcatttccccggccgaagcggcgatgtatttccacaagaccgaatgcttttgcttcacccagcaagtgctgcagccgggccagcgcatcgagatgccggtgcgcttcatcgtcgaccgcgacatgcccaaggatgtgaagcatctgaccctggcgtacacgctgttcgatatcactgcgcgccaaccgcccgtggctgtgcacagcggcggctagctactgtttgccccctcaatcaggagagcgaatacatgtcgactcatgatacgtactacgtaccggcgcaaagcaaatggccgataattgccacgattggcctgctggtcaccgtgtatggactggctgtgtggttcaacgacttgaaggcggcacgcccggaatcccacggcccgtggatctttttcgtcggcgggctgctgctggcctacatgctgttcggctggtttggtgcggtgatcaaggaaagccgcgccggtttgtacagttcgcagatggaccgctcgttccgctggggcatgacctggttcatcttttccgaagtgatgttctttatcgccttcttcggtgcgctgttttatgtgcggcacatgtccggcccgtggttgggcggtgagggtcacaagggcattgcgcatatgctgtggccgaacttcgaattcacctggccgctgctcaacaaccctgaccccaaaatgtatcccgcgcctgaaggcaccatcagcccttggggtctgccgctggtcaataccatcctgctggtgagttccagcgtgaccatcactatcgctcaccatgccctgcgcaaaggccatcgcggcgcgctgaaaatctggttggcgatcaccgtcctgctgggtatggcgttcctgggcttccaggccgaggaatacatccacgcgtacaaagagttggggctgacgctcggctccggcgtctatggcgcgaccttctttatgctcaccggcttccacggcgcccacgtgactattggcaccctcattctgttcgtgatgctgatgcgcatcctcaaggggcatttcaatgccgagcaccagttcggcttcgaggcggccagttggtattggcactttgtggacgtggtgtggatcgggctgtttttcttcgtctacgtgttgtgagacggcttaccacggcgcatgagaaaccagttggccgctgaaaaagccccaggtgatcaaggccagggtgatcacggccagcaccacacgcacggtcagggcgttgacgaggcggttggagttgccctcgtccttgaccagaaagaacaagccactgaacaggctcacgacggtcgcgatcagcatcagggcaatagcggctttgagcatggtcgggctccacggggatgggcgggcaatgaaaacaagtatagccagcgccgcaaaacgctttcgtccagggatcgcacccaccttagtggtgctggtgctgctgcccctgatggtggggttggggttctggcaactgtcgcgcggccatgaaaagcagcggctggtggatagttatgccgagcggcgcgcagcggagccggtcagcagtgcgcaactcaatgatatggccgacccggcctttcgccgcgtgcgcctgcgtgggcagttggatgccgagcacagcgtgtttctcgataaccgcatgcgcgacggcaaggccggcgtagagctgctgcaacccttccacgatcaggccagcggcctgtggctgttgctgaatcgcggctggctgccctggccggaccggcgcacaccaccagccttcagcaccccggagcagcccttgaatctggatgcctgggtctacgtcgcccctggcgaaaccttccaactgcacgccgaccccgccagtgcgcaatggccacgcctgctgacggcgctgcaccccgccacgttgtgggcggagttggggcgcagcggtttcgcctacgaactgcgcgccgaacccggccccggcacttacgaaaccacctggcccgtcgtggccatgggcccggaaaaacacctggcgtatgccgtgcagtggttcgccatgtcgctagcgttgctggcgctttacctctacctcggatggcacaacaaaaaggagaagccccatgggagcggccatgaatccacccaacatgtctgaggtgcctgatcggcgcaaaggccgttggcagttgatcctgatcctgatgatggtgatcggcccgatggcgctggccaccttcatgtacaagctgcagttctgggtgccggacagtcgcagctaccacggcgagatgatcggcaacggccagacccgcgccgacattggcgtgccggccgatgagcagcgctggcaactgctggtcaccgcgcccgccgcgtgtgccgccgattgccagcaactggtctacctcgcacgccaattgcagattggcctggggcgcgacgcttcccgtgccagccatgccttggccagtgcgcagccgctgggcagcgactatgacgccaagctcaaggccgagtacccgcaactgcaacgctacccgctggacttgtcgaccttcagtaaaaatgccgctgcgccgggcgatgcgcagctgtggatcgtcgacccccacggcaacctggtgctgcgctacgacgccagggtcaacggcaaggacttgctcaacgacctgcgccatctgctgaaactgtcgaacatcggataggggcatcgtcatggccaaacctggatttcgcctcgcgttgtttgcgaccttgctggcgctgattgtcgtgctgctgggggcgtatacccgcctgacccacgccggcctggggtgcccggattggcccggctgctacggctttatcagcgtgcccaacaccgaggctcaactggcccatgccgagctgcatttccccgatacaccggtagaggccgacaagggctgggccgagatgacgcatcgctacttcgccggcaccttgggcttgttgattgtgttgctggcggcgcgctcgtggagccatcggcgcaatccgggccagccggtgaaactgccgctgttcgtgctggcggtggtattcgcccaggccgcatttggcatgtggacggtgacgttgaagctgtggccgcaggtggtgacggggcatctgttgggtggctttgcgacgttgagcctgctgttcctgctgaccttgcgcttgtctggcgtattgccggccttgatcgtgcccaagcgcctgcaatattgggcgacggcaggcctggtgctggtgatcagccagatagccctgggcggctgggtcagttcgaactatgcggcggtggcctgtatcgatttgccgacctgtcatggcgagtggtggccggcagccgattttgccaatggcttccatctcacccaacacatcggccccaattacctcggtgggcagttggacagcgaagcgcgcaccgccatccacctgacccaccgcatcggcgccgtcgttgtcagcctggtgctggtgggccttgcctggcaattgcgcgcggtcggcatgacgcggttggccggcttgctgctgatcgccctggcggcgcaaatctgcctgggcctgagcaatgtgtatttccatctgccgctgccggttgcagtggggcataacgcgggcggtgcggcgttgttgctggcgctggtactggtcaactaccacgcccgcaccagcctggtccgggtgcgcaaccagctgccgtttggctggcgctttatcccgcgcaagcatgtgtcgggcctcgttacccttaaaggagagatgccatggcgaccttgatcggcgcgcgtcacggccaggccatctggcgtgattatctggagctgaccaagccgaaggtggtggtgctgatgctcatcacctcgctggtggggatgttcctggcgacccgcgccggtgtgccgtggaccgtactggtgtttggcaacctggggattgccctgtgtgccggtggcgcggcggcggtgaatcatgtggtggatcggcggatcgatgcggtgatggcgcgcacccacaagcggccgttggcgcaaggccgtgtgtcgccgctggcggcgctggcctttgctttgtttctggctgttgcagggttggctctgctgctggcgtttaccaaccctctggcggcttggctgacgctggcctcgctgctcggctatgcagtgatctacaccggctttctcaagcgtgcgaccccgcagaatattgtcatcggcggcttggccggggctgcgccgcctctgttgggctgggtcgccgtgaccgggcatatcagcgccgagcccctgctgttggtgctgatcatcttcgcctggaccccgccacacttctgggccttggccatccatcgcaaggaagaatacgccaaggccgatatcccgatgctgccggtgacccacggcgagcactacaccaaggtgcacatcctgctctacaccttcgccctgctggcggtgagcctgatgccctacgtgatccacatgagcggcctgctgtacctcggctgcgccctggtattgggcgggcgctttctgcaatgggcctgggtgttgtaccgtggcggtcggccgcacgcggcgatcaacaccttcaagtactctatctggtacttgctgctgctgtttatcgccctgctcgtagaccactacctactgttgaacctatgactcgaactcaaaagactgtcttcatcctagtggccctggtggcattgatcatgggcctgaccgttaacaaagtgctctcgggcaagggccagggcgaccccactgccttgatcgacgccggcatcatcctgctgccgcaaagtcgtcaactgccgccggtgaccatgaccaaccaggacggccagccagtgctggtcaatgaattgaaaggcaagtggagcctgttgttcttcggctacaccttctgcccggacatctgcccgactaccctcgcccagctgcgccagatcaagagcgagctgcctaaagaggctgtggataagttgcaggtgattttggtcagtgtggacccgaaccgcgatacgtcgacccagctcaagcagtacctgggctacttcgacccgcagttccagggcctgacgggcgcgaatgtggaggaggtgcagaaggtctcgaatgcggtgagcatcccgtttattccggcggacaccagtaagccgaactacaccgtcgaccacagcggcaacctggcgctgatcgggccggatggaacgcagcgtgggtttattcgtgcgccgctgaacaaccagaagctggtggcgcagttgccagcgttgctgcagcgtcaataacaggcgacacataacaaatgtgggagggggcttgcccccgatagcagtgggtcagccaccaaagcagtgactgacactcagcaatcgggggcaagccccctcccacattttttgatctccagtacttgggagatcgggttacatcagaacgccggcttgatcgcgcctttgtacttctcttcgatgaattgcttcacttcaggcgtgtgcagggctgcaaccagcttcttcacggcgtccgagtccttgttgtcttcgcgggtcaccaggatgttcacgtaaggcgagtcgctgccctcgatcaccagcgcatccttggacgggtccagcttggcttccagcgcgtagttggtgttgatcagcgccaagtcgacctgggtcagtacgcgcggcagggtagcggcttccagctcgcggaatttcaggcctttagggttggcggtgatgtccttgatggtcgacaggatattggtcgggtccttcaaggtgatcaggccgttcttggccagcagcaacagtgcgcgaccaccgttggtggcgtcgttggggatcaccacgttggcaccgctaggcagctcgtccagcttcttgtacttgctggagtacgcgcccagaggctccaggtgcaccgcgccaacgctcaccaggtgagtgcccttggctttattgaattcatccaggtacggctggtgttggaagaagttggcgtccaggcgcttttccgcgacctgtacgttcggctgcacgtagtcggtgaagactttgacctgcaggtccacgccttctttggcgagggcaggcttcacgaattcgaggatttccgagtgtgggaccggcgaagcggcgaccgtgatggtctcggcgtgggcggaaaacgcggcaacggcggcgaaagcaaccagtagttttttcatccaacaagctccttgttcgggcatgtgccggcatgtcaccggcaatggccgttattttcgagaaaagtgcaccaccagcttgtcgccgacggtttgcagaatttgcaccaggatcaacagcatcaccactgtgaccaccatcacgtcagtctggaaacgctggtaaccgaaacggatcgccaggtcgcccaggccaccggcacccaccacaccggccatggccgtgtaggacaccagtgtaatcgccgtcaccgtgatcgccgcgaaaatgcccgggcgggcttcgggcagcaaggcgttggtgatgatctggcgcgtgctggcgcccatggactgggtggcttcgatgatgccgcggtccacttcgcgcagcgcggtttccaccaggcgtgcaaagaacggggtcgcgcccaccaccagtggcggaatcgcaccggccacgcccagcgaagtgccggtgatcagcacggtgaacgggatcatcacgatcagcaggatgatgaacggcagcgagcgcaggatattcacgatcagcgacagcagcgcgtacaggcctttctgttcgaacagttggcgcgggctggtcaggaacagcagcacgcccaggggcaggcccagcaccacggtgaagaacagcgagccgaacagcatggtcatggtgtcgccggtggccagccagatttcggaccagtcgatattggcgaagaaactcaacaggacgtccattagcgcaggatctccatgtggacatcagcggcggtgaagcgcgcaaacgcggcttccatgtcgccaccggtgacggcgagggtcaattgcccgtaagggatgtctttgatgcggtcgatacgaccggcgaggatgctgtagtccacgcctgtttcgcgggcgacggtgcccagcagcggcgcgtaggtcgcttcgccctggaacgtcaggcgcacgatacggcctggcacgtgggcgaagtcgtcgcgctgctcgttttcgtcgacctgctcggactcttgcacgaagcgcttggtcgtcgcgtgcttggggtgcaggaacacatcggccaccgagccttgctcgacgatcacgccagcgtccatcaccgccacctggtcgcagacgcggcggatcacgtccatttcatgggtgatcagcacgatggtgagcttcaactcgcggttgatctcggccagcagttgcaataccgaggcggtggtctgcgggtcaagggcgctggtggcttcgtcgcacagcaggatctttggtttggtcgccagggcgcgggcgatgccgacgcgttgtttctggccaccggacaactgcgccggatactttttggcgtggtccgacaggccgacgcgggcgagcagttctgcgacgcgcaggtcgatgtccttgcgcgacagttcgccggccagggtcagcggcagtgccacgttgtcggccacggtcttggaggccagcaggttgaagtgctggaagatcatcccgacctgctgacggaagcggcgcagaccgttggcgtccagggcggtgacttcttcgccgtctaccgtgatcttgccaccgctcggttcctcgaggcggttgatcaggcgcagcagggtgcttttacccgcaccggagtggccgatcaggccgaacacctggccgtttgcaacactcaggttggtggcgtgcagtgcgggaatatccctaccggcgacgcggtaggttttatggacgttttgaaactcgatcacgtagcgaaccttgtggggcgcatggaaaagggatcagcggttagccgggcgcgcattttagcctgtccgtatagcgtttcttagcatttatttcgcattcaaccagcgatttggcaataacgcgatcaaaggtcataaaaaaggaacggcccaaaaccccatcagtcactacttaagcaatgcgattcccgggtgccgtgcctgggtctgaataaggagttttgactgatgagtacgaaaaagccaaagagcgaactcgcagggaccgacaccctggaccgtaagaacaccaatgccaagctagagtctttggaagaattccgctccgacgctaccggccaggccctgcgtaccaaccagggtgtgaagatctccgacaaccagaacagcttgaaggtcggcgcacgcgggccgtcgctgctcgaagatttcatcatgcgtgaaaaaatcacgcactttgaccatgagcgtatcccggagcgcatcgtgcatgcccgtggtactggcgcccatggctattttcagacttacgagaaccattcggcgctgaccaaggccgggttcctgcgtaaccctgggcataaaacgccggtcttcacgcgtttttccaccgtgcaaggcccgcgtggttcgggtgacaccgtacgtgacgtgcgcggttttgccgtgaagttcttcaccgaagaaggcaacttcgatctggtgggcaacaacatgccggtgtttttcattcaggacgcgatcaagtttcctgacttcgtgcacgccgtgaagcccgagccgcacaatgaaatccctacaggcggctcggcgcacgatacgttctgggacttcgtctcgttgcagcctgaatcggcgcacatggtgatctgggcgatgtctgaccgcgccattccaaaaagcctgcgcagcatgcagggttttggcgtgcacaccttccgcctagtgaatgccgagggaaaatctaatttcgtcaaattccactggcgccctacagccggtacctgctcgctggtgtgggacgaagcgcagaagctcgccggtaaagataccgactaccatcgccgcgacctctgggaagccattgagatgggcgactaccccgagtgggaattgggtgtgcaggtgattcccgaggacaaggagcatgcgttcgacttcgacatcctcgacccgactaagctgatccctgaggaactggtgccgattacgccgctgggcaagatggtgctcaaccgcaacccggacaacttcttcgctgaagtcgagcaggtggcgttctgcccaggccatatcgtgccgggtatcgacttctccaatgacccactgctgcaaggtcggttgttttcctacaccgatacgcaaatcagccgactcggcgggccgaattttcaccagttgccgatcaaccagcctgtgacgccgctgcataacaaccagcgcgatgccatgcaccgcagcaccatcgataaagggcgcgccgcttatgagccgaactccatcgatggcggctggccgaaagaaaccccaccggctgcgcaggatggcggttttgagtcctaccctgagcgtatcgacgcgcacaagatccgtgagcgcagcgagtcgttcggcgatcacttctcccaggcgcgtctgttcttccacagcatgagcaagcacgagcaggagcacatcattgctgcctacagctttgagctgggcaaggtcgagcgcgagtttatccgtgcgcgtcaggtcaacgagatcctggctaatatcgaccttgaactggccaaacgcgtggcgcagaacctggggctgcccgcgccgaccaaaggcacggtgccggtacgtaaaacccagccggagcgttcgcctgcgctgagccaggcgaatttgctgccgggcgatatcaagacccgcaaggtggcgatcctggcagccaacggggtggacggggcggcgattgctgcattgaagaaggcgctgcaggccgaaggtgcgcatgccaagctgctggggccgacctcggcgccggtgaagacggccgatggcaagagcctgccggtggatgcatcgatggaaggcctgccgtcggttgcgtttgatgcagtgttcatccctggcgggaaagattcggtgaaggcgctgagtggcgatggggtggcgctgcattacgtgctggaggcgtacaagcacctgaaggcgattgccgtggccagtgatgccaagcctctgttggatctgctgaagcttgaggcggatgcggggttgatcgtgggcgcggacgctaaggcgttcaaggcgttctttgccgcgattgggcagcatcgggtgtgggatcgtgaggcgaaggccaaggcgattccggcttaagtctttggttgtttgttagattgtcatcgggggcaagccccctcccacattttgagctgtgaatacattaaaagtgtgggagggggctttcccccgatggttttattccgccttgcgcggaatcagcacaacctgcgccggaatcttcttcagaatctgccggtgaatcttcaggtcataccccgaatcaattcgcttcacccgtttggtcagcaacgtggccagccatgggtaatcctctgtgcgcggcgcctggatgcttacatcgcactggtaattcaccacgtcggtggcaatggcatccagctgatggcgcagttcttcgatgttggtgaggttcagtgccacggtggtgctgggtgccgtcgggtcgatgaccttggcggcgggcttggcttcggcggctttcaggtcggcttcggctttgtccagctcggccttgcgcgcatggctgatggcgctgttgaccccaccggtcagcgcgggtgccttgggcatcagggcgcgggcacggctaagggcggtcgcggcggcgtttacatcacccttttgcagcacgatctggctgcgttgcaagtaggcttcggccaattgccgctggtaggtttccagcgttgggtcgttgggcgattgggcttgcagcgccgccaattggtcctcggcagtggcaagctcgctgctgaccaggttttgctccagctgtgcgatggccgcagcgcgtgcgtccggggcctctgggacggcgggcggtgtgctttgacaggcgcccagcagcagggaaaatgcggcaaggagcagataacgggaggtgaacggcttcattcctgcgactctctatttgcgcaaaaagcgagcaagtctacacccctcgacggggcaggacaaaactcagcagaaacagggcggcggccgtgaccacaatcgacggcccggccggcgtgtccttgaaccaggacaacgccaggcccccgcacacagcgagcatccccagcaggctggcgcccaccgccatctgctccggtgagcgggcgtggcgctgggcagcggccgcgggaatgatcagcagcgacgtgatcaacaatacgccgacaatcttcatcgcgacagcgatcaccacggcgatcaacaacatcagggccatgcgcagggccggcacgggcaagccttctaccgtagccagttcttcatgcacggtaatcgccagcagcgggcgccacagggcgaccagcagcaccagtacagccgcgctgccgccgaggatccaggcaaggtcgccggggctgatcgccagcaggtcgccgaacaggtaggccatcaagtcgatgcgcacttcatgcatgaagctcagcaccaccaggcccagggacagggtgcttggcgccaggatgccgagcaaggtgtcggaggccaggggctggcgctgttgcagggtcaccagcagtaccgccaacaacaggcagccgactgtcacggcgatggtcgggctgacatccaacagaaagcccagggccacgcccagcaacgcggcgtgcgacaaggtgtcgccaaaataggccatgcgccgccagaccacaaacgagcccaatgggcccgccaccaacgccaaagccaagcctgccagcagggcgtagagcagaaaatcagccatgcttgcagctatctccatgaacgtgggtgtgaggggcggcggggtcatcgacgacggcgccgtgcagatcgtgggcgtggtcatgatgatggtggtagatcgccaggctctgggcgttcttgccgaacagctcgacgaacgccgggtcgccgctgacctgttccggatggcccgagcagcacacgtggcggttgaggcacaccacctgatcggtggtgctcatcaccaggtgcaaatcgtgggacaccatcagcacaccgcaaccatgacggtcgcgcaggcgggtgatgaggctgtacagctcggcctggccggcgacgtcgacgccctgcacgggctcatccagcaccagcaactccggctcgcgcagcagggcgcgcgccagcagcacgcgctgcatttcgccgccggaaatgctttgcactgggctgtcgatcacctgttcggcaccgacttccttgagcgcagcctgggcgcgtgcacggtccacgccaggcaccaggcgcaggaaacgcaggacggacaatggcagggtcggatccacatgcagtttctgcggcatgtagccaacacgcagcctgggcttgcgccacacactgccggtgtcgggcttgagcaggcccagcacggcgcgcaccagggtggtcttgccggcgccgttggggccgatcagggtaacgatctgccccggttccacgctcagtgcgatgttatccagcacgttttgcccggcgaacgtgaccccgacctgttccaggcggattaacgcgttgctcatcaagccccctggcagcccgagcacaggccgaccacttcgaccgtttgcccttcgacccggaagccgacctcggcagaacttttgatgatggcgtcgctgatgcttttttgttcaagctcgatggcggcgtggcactcgcggcagatcaggaactggccctggtgtgcgtgttccgggtggctgcagccgacgaaggcgttcagcgaggcgattcggtgcaccaggccgttttccagcaggaaatccagcgcgcggtacacggtaggcggcgcggcgcggcggccgtcctgctcgctgagcacgccgagaatgtcgtaggcgcccagcggcttgtggctctgccacaccaattccagcacgcggcgacgcagtgcggtcaggcgcagacccttctgtgtgcacagggtgtcggcctccgacagcgcggtatgcacgcagtgagagtggtcgtggggacggctggcaagcggtgttttaggcatgagcggcgacagatatttgatagagacgttattatgttacccgttcctacgccattgagtggtcatcgtgtcccgactttttcccgtttttgtcgtatttgtcaccagtttgttcattactggcgccgctcaggccgaggtcaaggtgttgaccagcatcaagccgttgcagttgatcgcagcggctgtacaggacggtgtggcggttccggaggtgctgttgccacccggcgcgtcgccgcataactatgcgttgcgtccatccgacgtacggcgtgtgcagtcggttgacctgctgtactggatcggcccggatatggagagtttcctgccccgtgtgctgaaaggtcgtgcggctgcaactgtggcggtgcaggatctgccggacatgaagttgcgtcgttttgccgaagatagccactcacacgccgatgaagccgacgagcatgatcacgatcaccgcccaggcagcctcgatgcgcacttgtggctgtctaccgtcaacgcacgtgtgattgctgcgcgcatggcgactgacctggccgccgccgaccccgccaacgccgcgcgttaccagagcaacgtgaaggccttcgacgagcgcctggatgccctggatgctcgcctgaaagcccgccttgcgccgatcgatggcaagccttacttcgtgttccacgaagccttcgattacttcgaagacgcttatgggctcaagcatgccggtgtgttcagcgtggcagctgaggtccagccgggcgcccagcatgtggcggcgatgcgcacccgtttgcaggaagtgggcaagacgtgtgtgttcagtgaaccgccattgcgtccgcgcctggctgaaacgctggtggccgggttgccggtgaagttggcggagttggatgcgctggggggttacacgccggccacggctcagggttatgagcaggtgctggataagttgggcaacgatctggcgggttgcctggagtcactctgacagcaaacgacgaccaaatgtgggagggggcttgcccccgatggcggtgtgtcagtcactaatatttcgactgattcactgcaatcgggggcaagccccctcccacattttttgatctcacaggtctttagagggcaaatggcagttgcacggtgacctgctgacgctgcaccagccgatgctcgaactccgccgggtcatggatcaacacatcctgcccggcaaacgactcagcggcgatcaggcgtgacagccagaaccgcacacaggccacgcgcaacatcgtcggccacagttctgcctctttcgcggtaaacggccgcagccccgcatacgcccccagcaatgcccgggcgcgttgcccatcgatcacgccatcggcgtccgagcaccagtcattcagggcgattgccacgtcgtacaacatcgggccggagcaggcgttgtagaagtcgatcaggccggtgaggtgcgtgccttcgaacattgcgttgtcgcggaacaggtcggcgtgcacattggcgcgcggcagggcgaggatctcggccttgtgcgctgcgatctcggtcagggcatcttgcagcaggcgctgctgtgcggcgttcaggtgcgaaatcagttgcgcaccttcactgagcatccagtccaggccgcgatcggtcttgcgttcgaggactttctcgccctgcgtggccaggtgcagatggcccagcaggtcgccgacctgggcgcagtgctgagcgttggcatccttgatgtgcttgccggccagacgcggttgcagcagcgccggtttgcctttgagttcgcgcaaggctacgccgtcggtggtgcgcagggcgtaaggcaccggcaggtcggcgtcgtggagcacgtcgagcagttcgatgaagaacggcatttccgcaaccgggccgcgctcgaccagggtaaggacgaactcaccctgctccaggctgacaaaaaaattggtgttttcgctaccggcggcaatcccctggaagtcgatcaggcggccgaggcggtaaggggcaagaaaggtttccagctcgggccgagccaggggggtgaacacagacatggttaaaactgccagtacgggcgccgcggtgcgcggcgccaattgaagttaagaaatcatttccattcgaagatcttccatgacgggatcagcatatccggctggtcagaacggatgaagttcgcatcggttccgtccgcacgcaccaggaaatacggcggtgcgccttttacagtcaccttgatcgcgtacaggaaaccgttttggcgatattcctggatagttctgtcgccttccgtgcgaatggtcacttccggatcacccgaaggcgcgctgtccgccgccatggcagccatcggagtgagtgcaatcaagccagtcaacagcaggcgattgaatgtacgcatgataaccttgtccctttgtcgtcattggtccggctattctagcgcctgacccgccgaaaaggttgattctgctcatgagccaagcacccctcgtcctggtggacggttcttcctatctgtaccgcgccttccatgcgttgccaccgctgaccacctctaaaggcctgcctaccggcgcggtcaagggcgtgttgaacatgctcaagagcctgcgcaagcagtacccgggtagccccttcgcggtggtgttcgacgccaagggtgggacctttcgcgatgatatgtacgccgaatacaaggccaaccgcccgagcatgcccgatgacatgcgcgtgcaaatcgagccgttgcaccagagtgtgatcgcactgggcttcccgttgctgtgcgtcgaaggcgtcgaggccgatgacgtgatcggcaccctggcgcgcagcagtgcggcggctgaccgcccggtggtgatctccaccggcgacaaggacatggcgcaactggtcgacgggcacattaccttggtcaacaccatgaccggtagcgcgatggacatcgagggcgtgaaggagaaattcggtgtcgctcccgagcagatcatcgactatctggcgctgatgggcgattcgtccgacaacataccgggcgttccgggcattggcccgaagactgcttccggcttgctggtcggcgtgaacggcggcatcaaagagctttatgagcagctggatatcgtgccgaccttgcctatccgtggcgccaagacgctgccggccaagctggaagagcatcgggagagtgcttttctttcctaccagttggcgacgatcaagtgtgatgtgccgttggatgttggcctggatgatctgcacctgaccgagccggatcgcgagaagctgctggagttgtacacgttgctggagttcaagagctggattgatgagatccagcgcgacgccaagcgtttggagctcaaggctgcgccggttgccgaggaagctgttgaggcggcagcaccggcagagaccctctacaccaccatcctcgaccaggcgacgttcgacatctggttgaagaagctcaacgacgcgaagttgttcgccttcgacaccgaaaccaccggtatcgatgcccagcaggcgcagttggtcggcgtctccttcgctgtgcaggcccatgaggcggcctacatcccgctgacccattcctacatcggcgcgccggagcagttggaccgcgacactgtgctgctggccctgaaaccgctgctggaagacccgaccaagctcaaggtcggtcagcacgccaagttcgacatgaacatcctggccaactgcgccatcggtggcgacccggcgcagggcatcaccgtgcgcggcatcgcgttcgacaccatgcttgaatcctatgtgctgaactccacggcaacccgccatgacatggacagcctggccaagaagtacctggactacgacaccgtcgccttccaggacatcgccggcaggggcgccaagcagttgaccttcgaccagatcgccctggagcaggccggcccttatgcggccgaagatgccgatgtgaccttgcgtctgcaccaggcgttgtttgcacagctgacggccatcccgagcctggcgagtgtactcacggatatcgagattccattggtatcggtgttggcccgtatcgagcgtcagggtgcgctggtggacaaggacctgctaggtgtccagagcatcgagctgggcaacaagatggtcgagctggagcgtcaggcgttcgagattgccggtgaagaattcaacctgggctcgcccaagcagctcggcgcgattctttacgaaaaactcggcctgccggtactgaaaaaaaccggcaagggccaggcgtccaccgccgaagaagtgctggccaagttggctgaagatgactacccgttgcccaaggtgctgatgcagtaccgcagcatgagcaagctgaaaagcacctacaccgaccgcctgccggaacagatcaacccgcgcacagggcgtatccacacctcctatcaccaggcggtggcggcgaccggccgcttgtcttccagtgatccgaatctgcaaaacatcccggtgcgcaccgccgaagggcggcggattcgccaggcgtttgtcgcgcccaacggctataagctgctggcggcggactattcgcagatcgagctgaggatcatggcgcacctgtccaaggacgaaggcttgatgaacgcctttcgtcacaacctggacgtgcacaccgccacggccgccgaggtgttcaaggttgagctgggcgaggtcacctccgaccagcgtcgcagtgccaaggcgatcaacttcggtctgatctacggcatgggcgcgcagaagctgggcaaggatattggcgtcgataccaagacggccaaggcctacatcgatgtgtatttcgcccgttatcccggggttcgcgagtacatggagcgcacccgcgcccaggcggcagaccagggttacgtggaaaccttcttcggccgccgcctgtacttgcccgacatcaactccaacaagccccaggagcgcgcggccgctgagcgcaccgcgatcaacgcgccgatgcagggcactgccgcagatatcatcaagaaagccatggtgctggtggacaactggctgacggattcgggcctggatgccaaggtgatcctgcaggtgcacgatgaattggtactggaggtgcgtgaggactcggtggcggaggtcagcgagaagattcgcgagcacatgagtgcggctgcgaagctggacgtaccgctgctggtggaagtgggtgtgggcaataactgggatgaagcgcactgatttgcgggctctgccatcgcgttgagtggtggcagagtgctttagtgcggaaatcactgtcggttatttcaaatagtttttctggcctgccggaacttaacccgtgaactgctactcagagttactgaatgggtggtgaagcccttcaatgctcctatgttgtgttaagtgttggcagatatctggaccccgccctagcggtccggaacttgaaccccgaacttcccctccccatacgaagtccggggttttttttgcctgcagaaaagttattccgcgagttccgcgcccttgtccgccaattccatccagccagccagcacggtgtaagcctcttccaggcccatgcgctttggtgccgagaacagctggatagtgatcgcgtcgccccagcctttacggatttcggactgcactttgagcaaggtgttcttggccgcgccgtaggtgagcttgtctgccttggtcaacaggatatgcatcggcatgccgctggcgaccgtccaatcgagcatcaacaggtcgaaatcggtcatcggatggcggatgtccatcatcagaatcaaacctttcaaactctcccggccacccaggtaagcctccaggtgacgctgccagtgcagcttcaacgggataggtacttttgcgtaaccgtagcccggcaggtcgaccagacgccgatcatcgtctagcttgaagaaattgaggagttgcgtgcggcccggggttttcgaggtgcgtgccaggctggcgtgagtcagggtgttcagtgcgctggacttaccggcgttggaacgaccggcaaaggcgacttcaaagccttcgtcatcggggcattggtcaactttggcggcgctgagcatgaacgtggactgttggcacaggccgaggatgggattcttgagttgcatgagatttccgatgtgggcggtgccgagaaagggtgcggcaagcggtgtcgtttccgtttcagtagcgccagtatataatgccgcagattttgtgtgtgctttgtcccagcgaaggatgaagttcacgggagcgatagacctttattgcgcattagaacgcaaaacgctctcaaaccctgaaatggtcgacgtatgaccaggtggttgctcgctatcggtgtcctggtcccgctttgcggcgctcaggctacacaggatccggaagcggtgtacaaccgagtttgcgtggcttgccatgccggccagttgcccaacgcccccagacggggtgaccaggcagcctgggcgccaagactggcgcagggcatggacacgctggtgcaacacgtgacccagggtttcaaggcaatgccgccgcgtggtttgtgcatggactgcagtactgaggattaccaggccatcattgaattgatggtgagtaaacccggtagataactcttaaaccccttagccgtagttggattagctgatgaacaaactgatcgtgagtctgctgttgaccttgggcatcaccggtgttgcccatgctgcaggcgacgctacagcgggccaggcgaaagccgccgtatgtggtgcttgccatggaccggatggtaacagcccggcgccgaacttccccaaactggccggccagggcgagcgttacttgaccaagcagatgcaggatatcaagtccggcaagcgcacggtcctggaaatgaccggcttgttgaccaacctcagcgatcaggacctggcagacatcgcggcgtattttgccagccagaaaggcagtgtgggagctgctgatccgaaactggtggcccgcggcgagaaactattccgcggcggtgacctggacaaaggcctgcctgcctgcaccggctgccattcgcccaatggcgcgggcatcgccgctgccggcttcccgcacttgagtggccagcacgccacctacatcgccaagcagctgactgatttccgcaaggaagaggccgggcgcacaaacgatggcgacgcagcgatcatgcgcaccatcgcgcgcaagctgagtgacgaggacattgcggcggtctccagctacatccagggcctgcactgaggtgcacgcaacgttaacactcgattaatcccgtgatgcaagcataaaaagggtggcccaggccgcccttttttgtggccggtgccgttacactaacgaactcatgcccgcgtagacctgtcacaacaaaggtcgcgtgaggcgactttatttgtccaggagtaaagcatgcgtaatctgatcctcagcgccgctctcgtcactgccagcctcttcggcatgaccgcacaagctgccgacgtgccgcttgaagccggtaagacctacgttgaattggccaacccggttccggtttccgagcctggcaagatcgaagtggtggagctgttctggtatggctgcccgcattgctacgcttttgaaccgaccatcaacccatgggttgaaaagctgcccaaggacgtgaacttcaagcgcatcccggccatgttcggcggtccatgggatgcccacggccaactgttcctgaccctggaagccatgggtgtggagcacaaggtccacaacgcggttttcgacgcgatccagaagcaaggcaagcgcctgaccaagcctgacgaaatggctgacttcgtggccacccagggtgtcgacaaggacaagttcctggccaccttcaactccttcgccatccagggccagatcaagcaggccaaggagctggcgcagaagtacggtgtgcaaggcgttccaaccatgatcgtcaacggcaagtaccgtttcgacctgggcacttccggtggtcctgagcagaccctcaatgtggccgaccaactgatcgccaaagagcgcgcagccaagtaaggggcccgtcatgcgccgctggggtaccgaacgtgtggttggcctgcatgatccgcaggtcaacgaacatcacctggagtccacgggcctgccggcagacagtcgtctgcgcctgctcagcttcaatatccaggtaggcatcagtaccgagaagtatcggcattacctcacccgtggctggcagcacctgctgccccacaacgggcgtgctggcaacttgcaaaaaatcggcaacctgctgaacgacttcgacctggtcgccctgcaggaagctgatggcggcagcatgcgctccggctatatcaaccaggtggaacacctggcccagctgggtgccttcccctactggtatcagcagctcaaccgtaacctcgggcgcctggcgcagcacagcaatggtgtgctcagtcgcttgaagccctcagtcatcgaagatcacccgttacccggacccaaggggcggggtgcgatcctcgtgcgctttggcgaaggcccggaggccttggtggtcgtgatgatgcacctggcactgggtgcgcgtactcgcacgatgcaactggcttacatccgcgagcttattggcaattacaaacaccaggtgctgatgggggacatgaatacccacgccagcgacctgttgcagaattctccgttgcgcgacctcgggctactggcaccgcaagctgaagccacgtttcccagctggcgcccgcaacgctgtctagaccatatcctgctcagtcctaccctcacactcgagagcgtgcaggtgctggcgcagcccatctccgatcacctgccggtcgcggtagagattcgtctgccgggttcgctcacggctgatgcattacccgcgttgagcccaggcccccgcggaccccttgcatgagcgacgacgcccagcgctggaaagagaaatacctcaagagcatcgagcaacaagagaaactcgaacgtcgctgggctgcccgtctcgacctgctgcgccgtggactggtgcgcagcacgctggcggctgagggcactgatcgcgcagtcgaccaatgcatgaaggaaatgcgcgacgttgtccgtaccgatgacatggacgccgccctcgctgccttgctgccgcgcctggaaaaagctgtgctggactccgagcagcgccgcgaaacccgggtcgaccagatcagcaccgcgctgacgtcgctggtcacgcaactacagaaacttccgttgccccgtgaggtggcccggccgctgaagacgttcgccaagcagttggacggccgcgtcggccaggcgcgagagatcccgctgttgctcagcgagttgagcggcctgcaaggccaggcgctgaacaacctggagccggacggcgaagctgcgcgaccagggcctgggcttttgcagcgcctgttcggtgccaaggaagttgcgaacgaggcggtggcagacgaatcgacaccccgaccggccccgcagcctgcggcagccaagccagtcgctgtcgagccacagccgtccgagcaatccgaggaactgacgcaagcgttgcgtgcctttgcgccgcagcctcaagaaacggtcgctcctgtcatcgagcccgtagcccccacccaggtggtcgagccctccagcgaaacctcggtctatgaagccccgcctcaagccttagcgattgagacacccgttgcgcgtgtcgagcctaagcctcaagtcgaagaacctgcagcggaaagcgccctcgccgccttcatcgaaacgcctgaagtgcaggtcgagaccccggatgagaccaccattggcagcttgtcgctccctccagtgctggaggagcctgatcctgacgagctgcaagcggatggagcctatgccctgcccgactcaccggagccgtcctatagctccgtggccaagcacatcgaagacaccctgctcggcctgctcgaagaactctcgttacccgagcgtcaccgcccccaggccgaagccatgcgcgagcgcctggcccacggcttgaactggtacgagctgttgccgatcctcgacgacctggcagtcttgatgctggcgatcaccgacagcggccagcatgagttcgaggcttacctcaagcagttaaacgagcgcctcgaggcgttccagggccacttgcaagtcgccagcgaggggcatgccgacagccgctccgccgcccgtgagctggacacgcagatccgcgaacaggtcgatggcctgcaaagcagcgtgcaggaagccgccgacctggacagcctcaagcacgtgttggaaagccatctggaggggctgctcggcaccatggatgagcaccagcagcagcgcgacctgcgcgagcaggagacggcggcgcgcctgaagggcttggctgagcgggttgccaatatggagcaagaggcccagggctatcgcgagcacctggaggtgcagcgccagaaggcgttgatcgatccgctcacgggcctgcccaatcgtgccgcctggagcgagcgcctcgattatgaggtgaacacctggcaccagcgcggcaataacctgtcgctggcgatgctggacctggatcacttcaagcgtatcaacgatggttacggccacctcgctggcgacaaggtgctgaagatcatcgccaacgtgctgcgcaagcgcctgcgcccgaccgactttatcgcgcgctttgggggtgaagagtttgtgttgctgatgcccgactcatccctggcggatgccctggccgtgggcgaggtgttgcgtgcggcgattgaagcgtgcccgtttcacttcaagggcgagccggtgacgatcaccgtgtccatgggcgtggcgcagttccagccgggagagcgcagtgacctggcgctcaagcgtgccgacgaagcgttgtatcgggccaaggccgccgggcgaaaccaggtgcaggccgcctgaaagatgttccattttgtgatttgaccgctggctcgcgatcggtacgttacactgttgcattatcgtcttctgcgtaacgtctaccgccatgaaatccttgtacttcgcttttgtgttcattctgctcgcaggctgtgccagcggccctcgcctggacaccagccacccctcggtgaaccacgacaaccgcatgcagttcgtagtcgtgcattacacctccaccaaccttgagcgctccctggccttgctcacccatggtcaggtcagcagccattacctgatcggcgacgacgcctcggccaccatctacaagctggtggacgagagccagcgcgcctggcatgccggggaaagcgaatggatgggccgcacctggctcaactccagctcgattggcatcgagatcgtcaatcctggctacaaggacacacctacgggccgcttgtggtacccctactcagaggcgcaggtgaagtccctggtggtgttgctcaaggacatcagcaagcgcaatggtatcgaccccaagaacattattggccacagcgatattgcgccgttgcgcaagcttgatccgggcccgttgttcccctggaagcggctggccgccgaagggttgggcgtttggccggatgcccaggccgttgcgcgcttccaggtgcaatacgccgccgagctgccaagcgtcacctggttccaggaagaactggcccgcctgggctaccagacgccgcagaccggcgagttggatgtggccacgcgccatgtgatcgcagcgttccagatgcatttccggccgtcgctgtttgatggcacgccagatgcggaaagtgccgcgatcctgcgagcgttgaaccgaagctagagtggcaacgccatatagaactgagtgccctgccctggccgcgagtacacgcccatgcggccgccgtgcaattgcacgatttccttgcacagcgccagccccaggccggcgccgcctttcttgcggcccacctggacaaagggttcgaagatccgtccctgctgcccataggcgatgccttcgccgttatcctcgacgctgacgatcactcgctcgccatggcgccgtgcctgcaggcgtatctgcccgcccgcgggagtgtggcgcagggcgttgcccagtagattgtcgagcacccgctccagttggacttggtccgcatatagccgaggcaggtcggattgggcttccaccagcagttcgatattttgcgcgttggctggctcggcgaagcgtgctcgggcgtgttcgagcagatcggtgacgtcgcacggccccagcgtgagtttctgcagtccattctgatagcgcgaaaagttgagcaggtcgttgatcaactgcatcaagcgctgcatctcttcattgacggtatccagcaagtccgcttcgcgggactccgccgggaacttcgcacgctcgcggaacagcccgaaggccatatgcatgccggtcaccggcgtacgcagctcatgggaggcgcgcaatacgaactcgctgcgcacccgctcgaaggcgcgttgttcggttacgtcgtgcagcaccatcactgcgccaagaatatgcccctgggtatggctcaccggggtcaggctgtaggtcagcagacgcagttcgccctcgacctccacttccaggtcgtccggcgcgcgctccaggttgccgccgcgcagcaccagttgcagttgttcatccagctccggacgcgacaaggcttcgcccaggccttggccgaggcgctcctcgtcccaacccagttggcgctgggccacagggttgaggtgctccaggcgaccttggcggtcaatcatcagtaagccatcgtcgatgctgtcgagcacggcctgcaggcgctgctggccggccagcagttcatcgacattggtcgcctgatgctggcgcagcgcctcggccatgatgccgaagcggcgggtcagctggttcatttccgctgccgaggagatcggcagcgttacctcaaaatccccttgtccgattttatctgccgctttggccagtgcttcgattggtccaccaaaacgccgggcgatgccatgggccgtcacaaatccgatgatcagtacagcaagccccaccaaccccagcaaaccggcgatccacaacgcgcgttcgcgggacttgtgctcgctgttgctgatgttttccaaggcctgcttgtgttcggcgatcaggccattgcgcagcgtgttgaaggtgtcggtgagtttgtccttggcgccgggtggtggcgtcggttgctgggactcgtcaaaggcctcaagcagcgcctgatactggcctcgagcctggctgaagcccgttccgcgaccgtcacgctgttcatgggcaataccctgatccagcaggtcgaagtagcgctgtttcgaggtttgcagcgcctcggggtccgggcgctcctccagcatcatgatcaactgatcgcccaggctctgacgcagcttgaggcccaggtccagagtgacgaagttgctgcgaatcagagactcctgggtcttggccatttgcatgacgctcaccagacccaggatcagacccaacagggcgacggtaatcagcgctgagatgctcaggaataaccgagtgcgcaacttcatcgctagcttcatagggtacagctcacaggttgtactgtttgcgtttgcggtacagggtcgacgcgtcgatgcccagggtgcgggccgcctgatccagggtgtcgctggtagcgagcacggcgcctatatgggctttctccaactggtccaggctgagtgccgcgccaatccgtggggcattgttgctaggttgttcggacatccccaggtggctgatttccaccttctcttgcgggcaaatgatgctggcgcgctccaccacgttgcgcagttcgcgaatgttgcccggccagcggtagttgagcagcgcttcacgcgcttcatcgctgaaaccccgtgctggacgggcatattccttgacgaagcgcgccaggaaccggtcggccaaggtcaggatgtcttcactgcgctcgcgcaacggcggtagatgcaaagtgatcacgttgaggcggtacagcaagtcttcacggaagcggccgtcgcgcaccatgtcttccaagttcaggttggtggcggcgagaatgcgcacatcggcacggcgggtgacggggtcacccacacgctcgtactccttgtcctggataaaccgcagcaacttgggttgcaaggtgaggggaaagtcgccgatctcatcgagaaacagcgtgccgccgtccgcttggttgacgcggcccagggtactttcactggcgccggtaaacgcccctcggctatggccgaacagttcgctttccatcagttctgccgtcagcgacgggcagttaatggtcacgcaggattttttcgagcgcttgctccaaccgtgaatagcgcgggccagttcacctttaccggtaccggactcgcccagaatcagaatgttggcgtctgtcccggccacctggcgcgccgtttccagcaccaccatcattgatgggctgtgagagtcgaggccgtctttcggctggcgcacttcgccctccagggcttcgagccgcgcagacagttggcgcacttccaactgcttggcggtggccaggcgcagttgatcggggctgcagggttttaccaggtagtcagcggcgccggcctggatagcatcgacggcggtatcgactgccgaatgggcggtgacgatcaccacgcgcatccagggcgcctggattcgcatctgggccagcacatccaggccattgtcttcgcccaggcgcaagtccaggaagcacaggtcgaatacctggcgttgcatcaaggcgtcggcctgggccgcgctgttcgcagtggcgacggtgtagccttcatcttccaggcaataacggaaggtgcggaggatcgcggactcatcgtccactaaaagaatgcggccttgaagttccttggctgattccatctgtcccgcgctccttaaactatgaatgatggtgtttagtcccggaataatcgggcaagttgcatggtttattctgatcgataaatagcagtctcgtgcaggtatctgcatcacttcctacaaagccccgtctgatggcgttttcatgccgtcttgccacttcggcaacaccctcttcgttttctatccctcgacccgaccgctggccatcgtgcatttcgcacggcatacacggaggcatcgtgcaggatgctggagggtgcatgagtctttagttcataactatctgattttattgagttttattttgtaaaaaaactggcacgcactctgcaatagctcttccaacgaataatcaaaatgcgggagaacaacagcatgactcgccaaagcctcagcgaactgcgtgtatcgccactgcgcttgcagcaaggtctgtttgccagcttggccctgatggtcacgctgatcggtggccagcagttgcaacattggcagcagagtcagcagcagatcccccagtttgaacgtccggccatgacccagacccatttccgttccgttggcagtgttgctgccgatgcaacagccccgcaattgcggatggttgaccaggcgtcgcccctgagtgagctgccatcccaagagcgttgggtgttctaggcaccaaaggccgcttgtgttgagcggcagcacggcaccacccctgttatttctatagatgcgtaaggagaatcaccatgttgagttgggcaatcacatttctgatcatcgccattgtggctgcagtcctgggcttcggtggtatcgcgggcaccgccacgggtatcgcaaaaattctgtttgtggttttcctggtgatgttcatcgcttccttcttctttggtcgtcgcggccgaggctgaaaatgaccactttgtccttcaaagccattactgccgccctgcttctgggcggtagcggcttggcgttggccgccaacgacggccagtcccgagccaacgaattgctgagcgcggacccgcaataccgtgaaacctggcaagacgtggtgaagaaagaagagcgcctgccggaatgggtgatgaacctgtccggcgccgccgagcagatgaatgccgtggaagaagatggcgacaagtatttggtcgggccactctgcgaaaccgctgacacctgcctgaacaagcgcctgatcgttgccttcagtctcgacaaagaagatgcctacgccatgttggtggaagtcccggccggtctgccgaaggacaagtcgccgacgcggcacgccgattaccggtttatcggtaagccggatgaaggcatgcaaaagctgctgatggagcagctgaagaaagatccgaattggtactaggttccgtctgacacgcttgttgtctgcggggccggcgtccatagaaagaagccgtcgcttctttctgtttgcaccgctcgccaagggtggtgcatgaccaaggggccgggttgctctgatcacctgcgatcggcgtgacctacgggtacagggagtgcctgcgcaagggccgggtcaggcaaaaagctgcggcgcaggttcacaagccaacggcttgctgaacttgcgacgggctttaacgctccttctctgcttctcatgccgcccgtagtcgtgatttccttttttgcttgtgcccaaccattacttggtgtgtcgggtagaccatctatcgataaaatttggtgggcgccataggacatttccgacactaaactgtggaattctcaggcatttccgccaacgctccgcagacgtcctgaatctctgagcgagccgggtttggccggttcacggcatttttgtcggacaaaatgtcacatttgaactgaccgttcggacagttattattaaaaaatctcatgccgattcggcatagggtaggcgtttacggcattagacgtcgcccccttgcatgggaatagttgcgccttttttcgcctgccagtaagccatttcggccacgctgcggtgaccttccatggaggcagatgcacacactttttcgctctcgagcgttgcggctggcgcatttgccttaagttcacttgaagtaagggtaatgacatgaagaaggcaaagctaagcctcgcctggcagatcctcatcggtttggtgctggggatcgcaatcggtgcagtgcttaaccatttcagtgctgaaaaggcctggtggatcagcaatgtgttgcagccagcgggcgatatctttatccgcctgatcaagatgatcgtgatcccgattgtgatttcctcgctgatcgtcggcatcgccggtgtcggtgacgcgaagaaactcgggcgcatcggcgtcaagactatcctttacttcgagatcgtcaccaccatcgctatcgtggtcggcctgctgctggccaacctgttccacccgggcgcgggtatcgacatgagtaccctgggtaccgtcgacatctccaagtacaccgccaccgccgccgaagtgcagcatgagcatgcgttcatccagaccatcctcaacctgatcccgtcgaacatctttgccgccgtcgcccgtggcgagatgctgccgatcatcttcttctcggtgctgttcggccttggtttgtcgagcctcaagcctgagctgcgtgagcctctggtaaccatgttccagggcgtgtccgagagcatgttcaaagtcacccacatgatcatgaagtacgcccccatcggcgtgttcgcactgatcgcggtgaccgtcgccaacttcggcttcgcctcgctgctgccactggccaagctggtgatcctggtttacgtcgccatcctgttcttcgcttttgtgatcctcggcctgattgcccgcctgttcggcttctcggtgatcaagctgatgcgcatcttcaaggatgagctggtactggcctactccactgccagttccgaaaccgtgttgccgcgtgtgatcgagaagatggaagcctacggcgcgccgaaagccatttgcagtttcgtggtgccgaccggttactcgttcaacctcgacggttcgaccctgtaccagagcatcgcggcgatcttcattgcccagctgtatggcatcgacctgtcgatcggccagcaactgatgctggtgctgaccctgatggtcacctccaagggcatcgccggcgtaccgggtgtgtccttcgtagtgctgctggccaccctgggcagcgtgggcattccgctggaaggcctggcgttcatcgctggtgtcgaccgcatcatggacatggcgcgcaccgccctgaacgtgatcggcaacgccctggccgtgctggtgatctcccgttgggaaggtatgtacgacgacgccaagggcgagcgctactggaactcgctgccgcactggcgtaccaagaccgccgcaccggtcgcccaggccacccgcagctgacagcgtgacggcttaaagacaaaccccggaaaattccggggtttgtcgtttctgccagccccgctatcattcgccccattcttcgggggattcaactgatgctcaatggcctgtggcttggcttctttgtcgtggcaatggtgtcggcactggcgcaatggctggtcggcggtaacgccgggatttttgcagcgatggtcgaaagcattttcgccatggccaaattgtcggtggaagtcatggtgctgctgttcggcaccctgacgttgtggctgggctttctgcgcatcgccgaaaaggccgggatcgtcgattggctggccaaggccctcggcccgctgttccgccgcctgatgccggaagtgcccgccggccacccggcgatcggcttgatcaccctcaactttgccgccaacggcctgggcctggataacgccgccacccccatcggcctcaaggccatgaaggcgttgcaggagcttaaccccatacccaacaccgccagtaacgcgcagatcctgttcctggtgctcaacgcgtcgtcgctgacgctgttgccggtgaccatcttcatgtaccgcgctcagcaaggtgccgccgacccgacgctggtgttcctgccgattctgctggccaccagcgcatccacgctggtggggctgctctcggtggcgatcatgcagcgcctgcggctatgggacccggtggtgctggcgtacctgattccgggtgcgttggtattgggcggctttatggcgctgctcgcgaccctctccgccacggcgctggccgggctgtcctcgatcctcggcaacctcacattgtttggcctgatcatgctgttcctggggatcggtgcgctgcgcaaggtcaaggtgtacgaggcgtttgtagaaggcgccaaggaaggctttgacgtagccaagaacctgctgccgtacctggtggcgatgctttgcgccgtgggggtgttgcgagcctctggcgcgttggattttggcctggaaggcattcgccatgtggtcggctggacgggcatggacacgcgctttgtcgatgccttgccgaccgcgatggtcaagccgttctccggcagcgccgcgcgggcgatgttgatcgagaccatgcagacccagggcgtggacagctttccggcgttggtggcggcgacgattcagggcagtaccgagaccaccttctatgtgttggcggtgtactttggttcggtgggtattcagcgggccaggcatgccgtgggctgtgcgttgttggcggagtttgccggcgtcgttgcggcgattgcggtgtgctactggttcttcggttaaggctcggattgctatcgggggcaagccccctcccacatttgaatgtgttcacagatcaacctgtgggagggggcttgcccccgatgaggccctcagtgtttagctgcactattgccttgctgaaccacccactccaccacctgcttattcaactgatcccccgcctgtccaaacccagccaccaccgccggcactttggtgtcccccaccggctggtgcacttcgaaccgtcggctggcaataatccgctgatcacgcccgcgcaccaggcgcgcatccaggcgaatcaccacctccaccacactgccatgatattcactctggaacgcctgcaattgcccgcccagttcatagtcggactgcaggttagtgtcatcggtgctcagcagcgtcacccggccatcgcgctggaagccatccataaagcggttgcgcaacagcaccggcgccgggtcgctccagcgtgagttggcatagctgctgatcaggtcgccattgggcaccacggcgatgcgtgggctgtcgagaaactcgctggtctgcggcttgttcacgcgcagtgaccaactgaccggcgcgccctggctggtggtctgcgccgaagccaggcgatacacgtccgaagggtcagccttgggcagaatcgaacacgcgctcacgagcgccagtgctagaggggcaatcagttggtaagcacgcttcatggcgtgaactccttgttcttgtcgctgcccagcaggtaaccgctggggttggcttccaggcggcgggagatggcgcgcagcgagcctagggtttcgcgcagctcgcgcaccgccggcgccagttcgttgaggccttgcatgccgctgttcaccgagtccttgttgttggtcagcaaggtgttgatggtcgcggtgctttgttcaagggatttcatggcctgctcggcgctgccgaaggcctgcttgccttgttcgttgagcaagccattggcgttgcgcatgagcacggtggtctgttccagggcggcggtcgcctgtttgctcacctgcatcagttgctgcatcaccactttgatatcgccacgctgatcggcaatggcgccagtggtttgctgcaggttctccagggtgttgctcaggcgctcgacgttctcgcgggagaacatgtgattggcgttgtgcaacagcaggttgacgctggtcatcaggtcgttgctgttgttgagcaagcgtgcgatgggcgatggcgaggcgatgatctgcggcaggttgccgtccttgcccttgagctcggggctttgcggggtgccgccgctgagctggatgatcgaggtgccggtgatgccggtcagggcgagcttggcctgggtgtcctccttgaccggcgtctgcccggccaggcggatgcgcgccagcacgcggcgcgggtccttggggtccaggctcaggctgatcacatcgcccaccttgatcccgctgtactgcaccgagctgccctgggacaggccgctgaccgcctcgttgaagatcacttcatagtcctggaaggcgctgtcgacgctggacttggccagccacaggccgaacagcatcgcgccgaccaccacgatcacgctgaacagaccgatcatcacatgatgggctcgggtttccatgtcatacctcgttgagcgattgagcggcatccaatgccgcgcggccacgggggccgtggaaatattcgtggatccatgcgtcgtcggtttccgagacaacatcgatggcatcggccaccagcactttcttttgtgccagcaccgccacgcggtcggtaatggtgtacagcgtgtccaggtcgtgggagaccaggaacacgctcaggcctagcgcatcgcgcagggtcaggatcagttggtcgaattgcgccgcgccgatcgggtcgaggccggcggtgggttcgtcgaggaacagaatgtccgggtccagcgccaacgcgcgggccagggcggcgcgcttgatcatgccgccggacagcgaggccgggtatttgtcggccgccgacagcggcagcccggccagggccagtttgacggcggccaagtgctcggcgtcgcgacggctgaggccggcgtgttcgatcaagggcagcgcaacgttttcggtaacggtcagcgaggaaaacagcgcgcccttctggaacagtacgccaaagcgccgttctaccaaagagcgttcgtgctccggcaagctcggtaggttcttgccgaacacccgcacctcaccttcgctgggacgacgcaggccgacaatgctgcgcaacagcaccgacttgccgctgccggagccgccgaccactgcgaggatctcgcccttgtacaaatccaggtcaaggttttcatgcacgctctggctgccaaagcgattgcacaggccgcgcacttcaatcaccgcctcactgggcgctcggtgtagacggctcaccagcccatctccatgaaaaacagcgcggcgacagcatccatcacgatcaccacaaagatcgattgcaccacgctggaggtggtgtgggcgccgactgattcagcgctgccgctgaccttgaagccttccaggcaaccaatcgcagcgatcaggaacgcaaagatcggcgctttcaccatgcccaccaggaagtgctgcacgccaatgtccgattgcagcagcgagaggaacatcgccggcgaaatatccagggccaccgcgcacaccacgccgccgccgatgatgcccgagagcatcgccaggaacgtcagcatcggcagcgccaccagcagcgccagcacacggggcagtaccagcaactccatcgggtccaggcccagggtgcggatcgcgtcgatttcttcgttggccttcattgagccgatctgtgcggtaaaggcactggcggtgcggccggcgatcaggatggcggtgagcaagacgccgaattcccgtaggaaagagaacgccaccaggtccactgtgaagatcgtcgcaccgaagctcttgagcacggtggcgccgaggaaggctactaccgcacccaccaggaacgtcagcaaagccacgatgggcgcggcatccagtccgacctgttcgaggtgcgcaaccattggcgtcacgcgccagcgcttggggcgcaaaatgctacgggcgaaggtttcgagaatcaggccgacgaaacccaagagtttcttggtgtcctgccagacggtgtccaccgcacggccgatgcgtgcgaggacctggatacccgccgcttcttcaggggctttttccggcacgcaaaaatcattcagggaacggtagacggtcttgagcagcgcgcggtcggcggcagacaagctgcaatcggtttgttcggcggactgctcgatgcgggtcggccccagcagctccaccagcaacgaggcgccggccgtatccagggcgccgaggccgttgaggtcgatgcgcgcgccggcgtcgtattggccgtcgagcttgtccgacagctttttcaggttggcatagtgggcaagcgtccagtcccccgtaatccgcagttgtggtggggtggtggacgtatcgaggtgggctgcgccggccgtcgtgctggtggtcataagctccgagcttgtttggctatccacaattcctacgtaatagcacgatacggcctactttgggttgtccgtttgtgctgagtccgtcaccttgaagcgcagcacgccgatcacttgcccgtcttcggtcagcacccgcacctgccagcggcccacggcgtcggccgggaagttctgcttgtgggtccaggcgcggtagccctctttacgcccgccgtggatatccagggcgatgcggtcgacctcttggccgttgaatttccacacgtggtagatgcgctcatccaggccacgcggcgcgttgatcgcggtataggcatacagcccaccgctgcgcagctgcgcggcagtgacttccttgaggtcgtcgcccggcgtgcggtcctgcagttgggtgctgatggccacttcggtcatccacagggtggctggtggcacccaactgcgcaggagccacccggcgcagccgatggtggcggtgaccccgagcagcatcgcccagcctttgacgctacgcagcggcaagcttaccgccaggcttgggatcgacagtgccatggccacgccgagggccagtttgtaactctcggcggtggtcaggtgcaggatgatcggcaatgccgtgagcagcgcggcgaacagggtcagggtatgcagcgccaggaacagtgagcgcttgggcgccagccacttgtagtacagcgggtcgatgatcgacaccagcgccgccgcgccgagcaagccggtgaataccgattggccgctgttccacgcggtggtgacgaaaaagaacggcagcacaaaaaacagactttcctggtggatcatctgggtcgcgtagcgcagcagcggttcggggatttcgcgcttgaagactttggtgaacagctgggtaaagctgttctccagcatcagccacaaccagctcaccagcatgatcaccgcaatccagctggccatgccctgctggcgatccaccaggatgaagctgcacacacccgagataaaaccgccgagtgcaatcacccctgggtagcgcttcatcagttcgagaacgcgctggattaagtgggtcaggtttggcattcggcgcttcgcagtcttgtaggaaaaatcccagacagaataacgtcttaggccgttgtacggtgggtcattgcacgatccgtttgcgataaacccgcacgccaatcaacacaaaggcgatcagccccagcactccggcgctgatccagctcagcatgtcgtagctgagcagtggtttctcgatgcgccagtaaccgggctgcttgaacacttcgcgcatggcctggttggtctggtccaggctcacggccttgatgcgcttggctgggtcgctgaagtggccgttgttgtattcggcggacgcgctccagtagtagtcggccaaggcgctgttgccttgcacggcccacgcctggcgcgcaatggcggcttgttgcaggcgcgcaaacactgctgggtcgaggccgtccttgagcagtcgggccttgaggtcctggaggacgtgttccgcttcggggaggttttcccgctcaaggtcggcattcaggctgaggaaaccgacgccgccgagtacttcgcgctcgctccagggaccgtaggacaaaccgtgcttgaggcgcagttggcgatacagcgcccagtccaagtagtccttgagcaggtcgtaggtttcatcatgtccgtcatccagcaccggctcggggaacagccagtgcaacttggcgctgttgccgacccagccgtggatcagctcgcgatggctggcagcggcgtgctggatttccggcagcgccggatgctcggtagggtcgaccgggtcgagttggccgtaggtgcgttccaggtaggccggcagcagtttgtcgaggtcgccgacgatgatgagggtcatgttgttgggggcgtaccagtgtgagcgcaggtcgtccagctggtcgcgggtcaggtggtcgacctcagcgcgttcggcgcatttgagccccagttcgacggccaattggttgctggcggtgtggcccaggtcctggcggtccagcaggcgttgcaggtgtgagtagtgaccgccgtcttcgcgctccactacccgcttggccgcgttgatattggcgtcggtcagttcggtgcgggtgatgatcgccagcagcaggtccagcactttgcgctggttttgcgcgggcgcctcgatcacaaaggtggtgtcggcgttgctggtgtaggcgttccactcgccgcccagggcttgcatgcggtcttccagctcggcttcgccgccgccgtcgatgccgctgaatagcaagtgttcgagcaggtgcggcagctctttgtctgcgcagttgaagtcatccaggcctactccgaccaccagacggatggccacatgcccgcgctcggtgcccggtttgagcaacaattgcaggccgttgggcaaggtgtagccctcgacttgcaggcgctcaaaggcaaaggcgtgggcagatcccatgagcaggcaagcgaacaacaggcgacgcataacaagcttcctggcgagtgaggtcatttttaactgacttcacgggccaccgtacgttcagggcgaatgtgtgatgtcggcaatatcttcggcggagagcgcgccggtgtcagacgtttccaacactacataggcactgctgcaaaacaacgagttcaggcgtttcatgtcggcaatcagttccaggtgcagagagctggtttccaggctctggacgatcttgcgctgaaggcggctgacgtgggcgtgggccaggcgccgttcctgggcgcggaagcgacgcttctcgcgcagcaactggcgggcgctttccgggtcggcactgaggaacaccgacaaccccaggcgcaggttggcgatcaactggctgtgcaggccggtgagttcctccaggcccacttcggagaactggcgacgctgagaggttttctgctgctggactttgcgcagcatgcgttcgatcaggtcgccggccagtttaaggttgattgacagttcgatgatctcggcccagcgccgattgtcgtgttcactgaggtcttcccggggcatttgtgccaggtagagtttgatcgcgctgtacagcgcttcgacatcatcgctgaggctgcgcatttcctgggtgatggcggtctgcttgccgcgcagcacttcaagcatggccatgagcatattgtcgatcaggtcgcccaggcgcagggtttcgcgggcagcgttggccagtgccaggctgggtgtggccagcgcggccaggtccaagtggcgtggtttggccttgccattgacctcttcgcgctcaggcagcagccaggcacacaagcgggccatcgggccaatggtcggtaacaggatcaggcaacggctgacgttgtagagcaggtgaaaggtgatgaccatgccttgtgcgctgtagtccaggccatccatccagcgtacgagcgggtcgagcaccgggatgatcagcaacaggccgatcaatttgtacaacaggctgcccagtgccacctggcgtccggcggcgttctgcatgctggtgctgaggaaggccagcacgccgctgccgatgttggcgccgatcaccaggccgatggccacgtgcaggccgatcacaccggcgccggccagtgttgccgtcagcaggacagccgccaggctggagtaggaaatcatcgcgaacagggcgccgaccagggcgtcgagcaggatgtcgccggtcaacgacgcgaagatcactttgacgccctgggcgtgggtaatcggcccggccgcttcaacaatcaattgcagtgcgaggatgatcagcccgaggccgatccccacccggcccaactgccctgctcgcgtttgcttgcgcgacaggaagaaaatcaccccaagaaaaatcagcagcggcgacagccaggacaaatcaaacgtcagcacccgcgccatcagcgcggtaccgacgtcggcgccgagcatggtcgccagggcgggcatcagccccatcaggccctggccgacaaaggaggtgaccagcatcgccgtggcgttgctgctctgcaccatggctgtcaccaggataccggcgataaacgccagccagcgcttggacatgttctgcccgatgacttggcgcaagttggagccgtagacccgcaggatgccggtacggacgatgtgcgtgccccagataagcagggtcacggcggaaagcagattgagcaaggtcagcatgctcggccccccgtgtgggtgcgctcgaaaatgagcgaaggaaagttgccgcgtgccgctctacgtcttgtacttaagctgtagttggcgaatgggttcggcgccagcatcgcatagctaaagtggggattgaaataaaactgtcatgaaatcagctttgtgcggatgaaaaaaaggggcctgtgcaggccccttttttgtctggctcgggattattgacccgggatgtctttgcgcagtttcacaggatcctgctgtttcttctttttcgcgatggcggtgcgcatcttgatgttcactgcttccaccgccagcgagaacgccatggcgaagtagacgtagccttttggcacgtgcacgtcgaaggattcggcgatcagcacggtaccgactaccagcaggaacgacagcgcgagcatcttcaacgacgggtgcttgtcgatgaattcgctgatggtgccggctgccagcatcatcaccaataccgccacgacaatcgccgcgaccatcaccggtacatgggagaccatgccgaccgcggtgatgaccgagtccagggagaacacgatgtcgatgatcgcgatctggatgatggtgtagatgaacttgccaccggcgcccttcggctcgtcgtgggtttcgtcttcaccttccagcgcgtggtacatctcctgggagcttttccacagcaggaacaggccaccgaagaacaggatcaggtcgcgcccggaaatgccttggccgaagaccacgaacaggtcggcggtcagttgcatcacccaggtgatcgacagcagcaacaggatgcgtgtgaccatggccagggccaggccgaagatccgggtgcgtgcctgcatgtgcttgggcatgcggctgaccaggatcgaaatcatgatgatgttatcgatgcccaggacgatctcgagggccgtcagggtgaagaaggcaatccagatttccggattggtcagccattccatgtgtattcctttgagcgagtgttaaaccgcgcaagctgcagcgccgcgcggttgggtgttcgggattatagagtgctgaacagaggaataatccccatcagcaaagcggcgaccattatgcacaggcataccagcactgcccacttgagggtgaagcgctggtgatcgccaaattcgatacctgccaaagcgaccagcaggtaggtcgaaggtaccagtgggctcaacaggtgcaccggttgtccgacgatcgatgcacgtcccatttctgcagccgtgatgccgtagtggctggcggcttcggcgagtactggcaatacgccgtagtagaacgcatcgttggacatgaagaaggtaaacggcatgctcaccagcgcggtgatcaccgccaggtacgggcccagcgcgtcagggataacggccagcaggctcttggacatggcatcgaccatgccggtgcccgacaggatgccggtgaagataccggccgcgaagatcagccccaccaccgccagtacgctgccggagtgggcggcgacgcggtctttttgcatctgcaggcatgggtagttgacgatcatcgcgatactgaatgccaccatgaacagcaccggcagtggcaacaggccggcgatcagtgtgcacatcagggcaaaggtcagggcaccgttgaaccagatcagtttcgggcgacgggcgtccgggaattgcgacacgctgatttcgctgtggtcgatctcgtcgccttgcaggtgcaattcacccaggcgtgcacgttcgcgcaggccgtacatgtaggcaatcaccaggattgcgacgacgccggcggccatggccgggatcatcggcacgaaaatgtccgacgggtccacgtgcagcgcgctggcggcacgggcggtcgggccaccccaaggggtcatgttcatcacgccaccggcaagaatgatcaggccggccatgatccgtgggctcatgccgatgcgctggtacagcggcaacatggcggccacgcagatcatgtaggtggtggcgccgtcaccgtcgagggacaccaccagggccagtacggcggtgccgaccgagactttcagcgggtcgcccttgaccatcttgagaatcttgcgcacggccgggtcgaacaggccggagtcgatcatcagggcaaagtacagaatggcgaacatcagcatcacgccggtgggcgcaagcttggtgataccggccagcatcatcgggccgatctcgggcgcgaagccaccgaacagcgcgaacaggatcggcacgatgatcagggcgatcagcgcggacaggcgcttggtcatgatcaggaacatgaacgtgatgaccatggcaaagccaaggaaagtcagcataggaatactccaggcgtagcgcggctagggaatggcgaaccgggtgcggtcagcgcagaacgaaaggcacgaggcgtacgggtggagttggggcgaacaggcgggtacgggcggacatcgggaatcaccattgttgttgttaacagccggtctgttgccggcagtgggggcgatcctagacgggtaagctttcagccagctttcgctgagtaaacgggtgacgaagggaatgcacgcagtctctggacttacatggaccaaaatgtgggagggggcttgcccccgatagcagggtgcaagtcactgcatgcgcaggctgacacaccgctatcgggggcaagccccctcccacatttgtctgtatttggcttgaggtttttagggcagttcgaggccgccggcggctttgtgcagcttgcgcaagtgttcgcccaccagcttgaggttggcttcacaggcggcaatctcggctgaacgcgaaggctccagcagcgccctcacctccttgtccaattcgccggtcagcgattgcagctgcttctggcgttcggcgctttccgattccaggcgtgtggcttccgaaggttgcggcaggccatagccgccgctgccgagcagctcagccgggcgactcaggaagccgctgttggcgaggatctgttgcagcgtggcattggctttctccatgccaccgttcttcagctcgcgagcaccgaggtagcgttgtttgacttcgtcctgggccagcatcaattgcttgcgaaagctcgcctgctccagcagcagcaacgcggcgctggtgcgcaagtcggcctggtcgaaccacgggcgacgctcctcagcgctcagggacagccagtcttcaacctgggtctgcttgatcggcaggtgtttgcgcagcacatcgaacatcgcctggtagcgttcgcggaaggagtcgaagtgatagcccaggcgcaatgccctgcgtttgtcgtccagtacgctggtgtcggccaggccgcgtgcgctcagcacctcaagcaaaccattgggggtgatgttgtccaggccggtcagttgcgggttggcactgccgctgcgtagcagtttcaggctctcgaccgcgcagttgttggagatgaagaagtagttgccgtcgtagctccaatgcatttcggcggcatgctcgacggtatcgttgatttcctggcgggtcagtttcaacggcaccgaggccaggccgcgcagctcggtcttggtgtattcatcgatcacttgcgccagcggcagcacgaacagccgcgaggggtacttgccgaccaggccatcccagctcgacagctgtacgtcaccgacgaacgcgcggtaggacaagaccagatgctggtccaggtccagccggcagtccggcccgcgtgggcgccccggtgcgcagatcaccaggcgcagcatgctgtggccccagcggctgaccaggttctggttggcctcggccagcaggtagtcgatctcgtagacgcgctccgggtccacatggcccagcggtgttttggcaaaatcgttaccggcgttgaggaacgcgtaggtgttggcgcaggtgtcttgctgcggcggggcccagccgaagtgttccttgtaatagcggaacagcgcgggacggcggcaggcgtagctcgggtcgaggagaaagtactccatgttgaccgccacaaattccaacgggctggtggtttcgtagatgtccgggctgcgggcgacttgaagattatgttgctcgcgctctccgcgacggcctacgtactgcggccagccggccaggtccagcaggcgtggatcatcgctcaaggtaaagcggcggccattctggccgcggcattgatcaggcaggccgatcaggccggtgaggttgttctggcggctgcagcggttgatcagcgtgcggtcttccttggaccacaggcgcgcacggtcatagatgtgggtcagttcatgcagcaccgtagcgagcatttcccggcgcacagtgccgtgaggtcgattggttttctgggtggcggcactgccgtcggtcaggctggcgagcaggttgctgttgaggtccagctcggacaccagggaggcttgcccgtaggcgttctcgggcatcttgtcggtccagccgacatcaatgcgtcgatccaactgctcgacaaagcgcggcggcaaggaacgcatcgcttcgtcgagcaatgcctggctcgcctgttgctcagccgggctcaggccctcggtcttgagccgcagttgcaggctggcctgggctgcgccggcacacagcagcacagtcccggccaggagccaggcgacgattcgcctcacagtgcgaggatggcttcggcgagggtctggtcgctggcgtcgcgggcttccggcaggcgtgtgcgcagagtgtcgaaggcggcttcaaggtgggcgccacggatctcgccgttgctggcgacgaaactggcggcgtcatcgtgggcttcgcgtacgactttggagtcacggatggaggtggtggtgtccgaggtgaaatcaatggtgcggccggaggcgcggacaatgatgttactggtggccaccagggtgtgtgcctgggcgatgtcggccaacaacagcaggccgagggtggcggcgatcagcgggctacgcatggaataactccagagacaaagatggaatacagagatgattattggacgagaattgcttgcgccagttcaaggtcgctggcgttaagttttggttggctgcggcgcaaataatccagcgcagattccagccttgcgccccgccattggccgtcagtggcgataaacgcggcagcgtcatcctgggcggccattatcacttttctgtcgaagggtgcagacgtcaccttgctggtggcgtaggcgcttgcgacggtgctctgggtggtcaggtcaaaggccgaagccaacggtgaccaaccgaacgaaaacaacacagggacgattaaaaggcggtatgaaaaagccatgggactcgacaactgaaagcgagcgccaaggctagcgcaatgcccgggcgagagccagcgcccaggcgttcgccttggcgtcagatagccaggatggcctgggccagttgtgcgtcagttgccgtgttcaattgcggcgcgtgctggcggatctgggccagggcgctttccagtttcacgccacggatggcgccttcgctggcgacaaagctggcggcgtcgtcacgggcagcacgtacgaccttgttgtcgcgcagggacgaagttgcatcggagctggcgtcggaagtggccttcagcgcgccgacgatggagtcggtggtcacgatgaagctggtcgcgttggcgttggcagccagggccaacagggtggcagcactcagcaggcgaagacgggacatgggatgactcctatagatgaacggataaggtggcgcaggccagccattggggatcagacgcctgtactgcacggtttgccacagggtggctggatattaagccgccgcttatccgttcgggaagcgccttgactgcctagtcacgccagaacggcttggacagctcggccattcgatcgccctggctgatgccgacatcggacaattcccgggtatcaagctgcgacagttggcgtcgttcataagcgtggcgtacccatttggcgagggttgaggccgtttggcgtagcagtctcttataaagaggggatggcgtatccatggcgagtacctttcctgaggtcttggaacaccatgttgggtgagttggtgagaccgatacagatacaccaagataaaattgtactgtttaactgttgcatttttttaaactgtacctgtcgctgcgcagagcttctgttttctgttggaaattcgaatgccgcaaacaacaaagcccgcctccggtttcccggggcgggctttgttttgacaaatcaggttgctggcagtggacccgtcaggtcagggccagcgagcgctaaatcagcgccagaacggcttgctcagctcttcgtagcgttgagcttcgctgatacctgcgtcagccagcagacgcgaatccaggcgagccagttggtggcggctggagatgcggcgctgccacaacatcaggttggcgataacgcgcagaggcagggaggcctgggtgtttacagctttttcttcgaagaacagttcggaactgagtgtacgttccatgatgacatccttccgcttgtggcgggattaggtagtggtttaactgatgccaatgatcctcttccggcgcaagactctctagatacagttcacctgtattgtgaggggccagttaactgtttataggcgctgtactgtacggaattggggcaactgtacctgtctgcactgaaatagtgcggaataggtgttttcggtgaggtgtgtgggatatttcggtaagaaatgaccggtacagcagtacagttttttcaataagtggcggtgaagccaccgagctgatgagactgtatttgcatcagctcggatctgtatcaatcacgccttgagcatgtgcccggtttcttccaggttgatgtgccaactcagtgcttcgcgcaggatgtgcggggtatgcccgccgatggcgcaggcggcatcgaagtaactgttcagcgcatcgcggtaggcggggtgcacacagttgtcgatgatcacccgagcccgttcccgtggcgccaggccacgcaggtcggccaggccaatctcggtcaccaggatgtcgacgtcatgctcggtgtggtcgacgtggctgaccattggcaccacactggaaattgcgccgcccttggcaatcgacttggtaacgaagatcgccaggtgcgcgttgcgtgcgaaatccccggagccgccaatgccgttcatcatccgcgtgccgcagacatgggtggagttgacgttgccgtagatgtcgaactccagcgcggtgttgatgccaatgatgcccaagcgccgcaccacctcagggtggttggagatctcctgcgggcgtagtaccagcttgtccttatagtgttccaggttgccgaacacatcggcattgcggcgctctgacaaggtgatcgaactgcccgaggcgaaactgagcttgccggcgtcgatcaggtcgaaggtcgaatcctgcaacacttccgaatacatggtcaggtcttcgaatggcgactcgatcaacccgcacatcaccgcgttggctatgttgccgataccggcctgcagcggaccgagcttgttggtcatgcgcccggcgtcgacttcctgcttgagaaagttgatcaggtggttggcgataccttgggtgtcgctgtcgggcggcgtcaccgtagaggcggagtcggcctggttggtgatcacgatggccacgatcttttccggtgggatcgggatcgcggtgctgccgatacggtcatcaactttgaccagcgggatcggcgtgcgcgtcggacgataggtcgggatatagatgtcgtgcaacccttccaggttcgggttgtgcgccaagttgatctcgacgatcacctgtttggcaaaaatcgcgaaactggccgagttgcccacagacgtggtgggcacgatatgcccttgttcagtgatcgccactgcttcaatcaccgcgatgtccggcaacttgagttggttgttgcgcagttgctcgacggtttccgacaagtgctggtcgatgaacatcacttcgccggcgttgattgccctacgcagggtgctgtcgacctggaacggcatgcgtcgtgacagtacgcccgcttcggtcagttgcttgtccaggtcattgcccaggctggcgccggtcatcagggtgattttcagcggcgacgtcttggcgcgttcggccagggcgtgggggacggccttggcttcaccggcacgggtgaagccactcatgccgacggtcatgccgtcctcgatcagtgcggcggcgtctgccgcgctcatgaccttgttcaacaacgaaggcaagcggatgcgatcacggtacatggattcttatctcaggctacggaagcaaggtgcgcagtttagtgatttcaaataatttcggcccgctaccatggtcgaatgccaggtagcgatttagagcctttggtcgggtttcatgcagcaataaaaaaccccagcctatcgcaggccggggtttcgagtattgcgctgaggcagtgttactcgacggctttgaccatgtcttcgataaccttcttggcatcaccgaagaccatcatggtcttgtccaggtagaacagttcgttatccagcccggcataaccactggccatcgagcgcttgttgacgatgatggtcttggctttgaacgcttcgaggatcggcatgccggcaatcggcgagttcgggtcgttcttggcggctgggttgaccacgtcgttcgcgcccagcaccagcaccacgtcggcctggccgaactcggagttgatgtcttccatctcgaacacctggtcgtagggcacttctgcctcggccagtaggacgttcatatggccgggcatacggccggccaccgggtggatcgcgtacttcacggtcacgccacgatgggtcagcttttctgtcagctctttcagcgcatgctgtgcgcgtgccactgccaagccgtagcctggcacgatgatcaccgtgtcggcgttggtcagcaggaaggtcgcgtcatcagccgagccggatttcaccgggcgtgcttctttagagcccgccgcagcacccgcatccggcgcattgccgaaaccgccgagcagcacattaaagaaggagcggttcatcgccttgcacatgatgtacgacaggattgcgccgctggagcccaccagcgagccggcgatgatcagcatcgagttgttcaacgagaaaccgatccccgctgcagcccagcctgagtagctgttaagcatcgacaccaccaccggcatgtcggcgccgccgatcgggatgatgatcagcacacccagcacgaaggctagggccagcatcagggcgaaggcggtgaggttgccggtgagcataaaggccaggccgagaccgagggtcagcaggccgagtaccaggttcagcttgtgctgcccgccgaactgtaccggtgcgccctggaacaggcggaacttgtacttgcccgacagcttgccgaacgcaatcaccgaaccggagaaggtgatggcaccgatggctgcgccaaggaacagttccaggcggttaccggcagggatcgaatcgcccaggtgtttgacgatgcccagggattgcggctcgactacggcggcaatggcgatgaacacggcagccaggccgatcatgctgtgcatgaaggcgaccagctccggcatcttggtcatttctacgcgcttggccatgaccgaaccggcagtgccgccgatcagcaggccgacgatcacgtagccaatgcctgcggtagccagctcagcaccgagcttatagatgaggcccacggtcgtgagcactgccagcgccatgccgagcatgccgaacaggttgccgcgtcgcgaggtggtcgggtgtgacaggcctttaagggcctggataaagcagatcgacgcgatcaagtagagcgtcgtaaccagattcatgctcattacttcggcgcctcttcttttgctttcggggctttcttcttgaacatctcaagcatgcggcgcgtcaccaggaagccaccgaacacgttgaccgctgcgagcgccaccgccagggtacccatggtcttgcccagtggggtcacggtgagcgcagcggcgagcatggcgccgacgatcacgatcgccgaaatcgcgttggtcaccgccatcaatggtgtgtgcagcgcgggcgttacgttccagaccacgtggtaaccgacataaatcgccagcacaaagatgatcaggttgtagataccgggggagataagctcttccatcgtctgaatccctgcttaggcgtttttgcggatgacttggccgtcgcggcacatcaggcacgcggcgacgatgtcgtcttcgaggttgatttcaaactgcccttctttagtgaagaccagcttcaggaagtccagcaggttgcgcgcatacaaggctgacgcatcggcggcgacagcaccggcgaggttggtcgggccgcagatgatcacgccattttccaccaccacctgatcggcgacggtcagcgggcagttgccgccttgtgccgcagcgaggtcgatcaccacggaacccggcttcatctgcgcgacggtttcagcgctgagcaatgtcggcgctttacggccaggaatcagcgcggtggtgatgacgatgtcggcctgcttggcgcgttcatgcacggccagggcctggcgttgcatccagctggagggcatcgggcgagcgtacccgccgacgccgacggcgcattcgcgctcttcgtcggtttcgtaaggcacgtcgacgaacttggcgccgagggattcgatctgctctttaacggccgggcgtacgtcggacgcttcgataacggcacccaggcgtttcgctgtggcaatcgcctgcaagccagcaacacctgcgccgaggatcaatacgcgggcagccttaacggtaccggcggcagtcatcagcatcggcatgaagcgcggatagtggtgagcggcgagcagtaccgccttatagccggcgatgttggcctgggacgacagcacgtcgaggctctgggcccgcgaggtacgtggcgcagcttccagcgcaaaggcagtgatgccctgctcggccagcttgccgatggtttcgttgctgaacggattgagcatgcccaccaacacggtgccgcttttgatcagcgtcagttcgctgtcgctgggggcgaccaccttgagaatcagctcggcgccaaacgcatcgttggcactgccaatggtcgcgcccgccgtttcataggcactgtcgacgatgctggctttgatgcctgctccgctttgtacagtgaccttatggccctggccgatcagcttcttgatggtttccggggtggcagccacccgcgtttcaccggtctgggtttcgagaggaacaccaatgtgcacgtcaaatctcctgcatgatctttttgcttttgatctttttgtaaaaaggccagtgcaccgcgagtggcacaactggggcggccgatcagcacgatcccgctgaaatgacagcggggcgcggcattttgcaggcgaactttacggccttcaagggattatgacgggtgacgaaaaattaactacaagtcaccctgtgactgattgtcgcaacatgccgaaataacctgttcaaatacatgggcttaaagggccgcaggcgtttttgcaatcttttgtcatggttggtgtgaatagtcggctattggctcgtaatagtcgttcaaagccatgtgaatcatggctttgagccgaatttttcctgaaaaatatagtctgcttaaatgcgacatatatatacatctgtaggactgtattattactgactacaaagtcaataatacggctttggcctttaaacattgatgctgtagcgatgtgactggtcaatgagccagtccctgaaagcgtgaagtgaggcagattcgacttttctgtcaggaatcatcaggtaataagccttcgtactgctcagcgcttcggggtttgcaatcaccaattggccctcgtccagttcgcgctggataaggaacggggggatcagtgcgatccccatgtcatgcatggctgcttgggacaacatcgagaatagctcgtaacgggggcctgtcatgtcgcgtgggatgttcaggtgttgggcgttgaaccattggcgccacgcgtagggtcgtgtggtttgctgcaggagcggcagttctgcaatctcctgggcgctgaactgcgcacggtcacccaacagccgagggctgcatacaggtacaggattttcgcccatcagccggtgggactcggtaccggaccagtcggcatcgccgaagtagatggcggcgtcgaattcggtgtcggcaaagaggaaagggcgtgttcgattcgtgaggttgaccgtgacctcagggtgttggcgttggaagtccttgaggcgaggtatcaaccattgagtgccaaaggtcgggactacggccagttcgatggtgttggcgccctgctgccccatgacggaaagcgtatcgcgctccaccgcatccagttgcgtcgccacgcgacggctataggacagccctgcttctgtcagttttaccccgcgccgtgaacggcgaaacagctcgacacttaaaaactcctcgagactagcgatctgtcgacagatggcgccttgagtgatcgaaagctcctgcgcagccttggtgaagctctcgtggcgggctgccgcttcaaagctcaccaacgcggtggtactgggaattttcctgcgcatataccgtgtcctcacttgccaaggcgcatatacgccatttttggctttttcgaagtgagaaattagcacaaccctatgcggaaacctcgtttgccctacgcgattgccgggcctaggctgcttccacgacttccgatttcttccgcgaggacttattcatggctggcaaggcaagcttcaactggatcgatccactgctgctggatcaacagctcaccgaagaagagcgcatggtgcgcgacagtgctgagcaatttgcccaggacaagttggcgccacgcgtgctcgaagctttccgccatgaaaagactgaccctgcgattttccgcgagatgggcgagaccggcctgctcggcgcgatgattcccgagcagtacggtggcagtggcttgaattacgtcagttatgggttgattgcgcgtgaggtggagcgtgtcgactcgggctatcgttcgatgatgagtgtgcagtcgtcactggtcatggtgccgatcaatgaattcggcaccgaggcgcagaagcagaagtacctgccgaagttggcctctggtgaatggatcggttgttttggtctgacagagcctaaccacggttccgaccctggcgcgatgatcactcgtgcccgcaaggtagagggtgggtacagcctgacgggcgcaaagatgtggatcaccaatagcccgatcgcggatgtatttgtggtgtggggcaaggacgatgctggcgacatccgtggttttgtcctggagaaaggctggaagggtctgagcgctccggcgattcacggtaaggtcgggctgcgcgcctccattactggtgaaatcgtcatggacaacgtgttcgtgccggaagagaacatcttcccggacgtgcgcggcttgaaggggcctttcacttgccttaactctgcacgctatggcatctcctggggcgcgttgggggcagccgagttctgctggcacaccgctcgccagtacacgcttgatcgccaacagttcggccgtccattggcggcgactcagttgatccagaagaagctggcagacatgcagaccgagatcaccctggctctgcagggctgtctgcgcctggggcgcatgaaggacgaaggtacggcggcggttgagatcacttccatcatgaagcgtaactcgtgcggcaaatccctggatatcgcacgcatggccagggacatgttgggcggcaatggtatttccgacgagttcggggtggcgcgtcatctggtcaacctcgaggtggtcaacacctatgagggtactcatgacgtgcacgccttgattctggggcgcgcgcagaccggtcttcaggcgttctattaataggagcacggcatgggcgcgctttcgcatctgcgggtgctggatttatcgcgagtactggcgggcccttggtccgggcagatccttgcggaccttggggctgaggtgatcaaggtcgagcggccgggcagcggcgatgatacgcgcgcctgggggccgcccttccttaaggatgcctatggtgagaacaccagtgaggcggcgtattacctgtcggccaatcgcaataaggagtcggtgacaatcgacttcacgcggcctgagggacaggcgctggtgcgtgagctggcggccaagtcggacatcctgatcgagaatttcaaggtgggtggtctcgcggcttacgggctggactatgaatccctcaaggagatcaacccggagctgatctactgctcgattacagggtttggacagaccggtccctatgcggcgcgtgctggttatgacttcatgattcagggcctgggcgggcttatgagtctgactggccgtccggagggagaagacggtgcagggccggtgaaggtgggggtggcactgactgacatcctcacggggctttactcgaccgtggcgatattggcggcactggctcatcgggatcatgatggaggcgggcagcatatcgatatggcattgctggatgtacaggtggcatgcctggccaaccaggcgatgaattacctgacgacgggtgtgccaccaaagcgtctgggtaacgcccatccgaatatcgtgccttaccaggactttcccacggccgatggcgacttcatcctgacggtgggtaatgacgggcagttccgcaagtttgctgaagtggctgggcagccacagtgggcagttgatccgcgcttctctactaataaggtgcgggtggccaatcgggcggagctgattcctctgatacgtcaggctacggtgttcaagacgacggcggagtgggtgtcgcagttggagcgggtgggtgtgccttgtgggccgatcaatgatctggcgcaggtgtttgccgatcctcaggtgaaggcgcgcgggctggcgatggcgctgcctcattcgttggcagggatggtgcctcaggttgccagtccgataaggttgtccaagacgccggtggagtaccgtagtgcgcctcctctgctgggagagcatacggccaaggtgcttcaggaagtattggggttgggggtggcgaatgtggtcgcattgaaggctgcgggcgtcatctgaatcctatcttctatatagagggcgttaacggcactttattggtggttttttaatcaatgctaactaattgatagaaaagcaaaattaagggttgacggcagattctggaagtctataattcgccccacttccggcgcagtcgaaacggaaaactccttggtaaacaaagagttacgcagaattcgacagcgacttgcttcagttcatcgaagcccagaaggagttggtagagcagtgttgtctggctctattaacgtttcgatcctctcggtcgaaagcggagaaaaagaggtgttgacagcagcgtgtaacgctgtagaattcgcctcccgctaacgagagatcggaagcgcaagtggttgaagttgttgaagaaatcttcgaaaacttctgaaaataatcacttgacagcaaatgaggctgctgtagaatgcgcgcctcggttgagacgaaagatcttaaccaaccgctctttaacaactgaatcaagcaattcgtgtgggtgcttgtggagtcagactgatagtcaacaagattatcagcatcacaagttactccgcgagaaatcaaagatgtaaccaacgattgctgagccaagtttagggtttcttaaaaacccaaagatgtttgaactgaagagtttgatcatggctcagattgaacgctggcggcaggc

SEQ ID NO: 19 - DNA, 62859 bp, Pseudomonas nodulensis
ctcagtagtgaaacgatgcatcgccgatggtagtgtggggtttccccatgtgagagtaggtcatcgtcaagattaaattccagaacccctgactgctaacgcagtcaggggttttgtttatgtagaagtccatgaatttcatcggcacgttgctaacccaacggtccggtacacagaatttcttgacgaccatagagcattggaaccacctgatcccatcccgaactcagcagtgaaacgatgcatcgccgatggtagtgtggggtttccccatgtgagagtaggtcatcgtcaagatttaattccgaaacccctgtctgctaacgcagacaggggttttgtcgtttggggccataagtcaccacaatttgtcgtttcctcacacatgcctaccgctggtcagtttcctgcttaaaaatcagaaacatcccacaattttctaagctttgccgcggcttggccgaaagcctgacgagccatgcgtgcaccgaaatagagcggccccagaagctgcctataccgttacatggaatttttcacccggcacgctcacccccctttggcaaaagaagtcgatgaaatgaatctcaagttcagtcataaaattctgttggccgcgtcaggcgtcgtggttctggccttcgcgttattcaccctctacaacgactacctgcagcgcagcacgatcaagcagaacctggagtcgtccatccagcaatccggtgaactcactgccagcagtgtgcagaactggcttagtggccgaatattggtactcgaaagccttacgcaaaacgttgctcaccaaggcagtggtgccgaccttcctggcctggtcgatcagccagcgttcactgataacttccagttcacctatgttggccaaaccaatggtgtgtttacccaacgtcctgacgcaaaaatgcccgatggctacgacccccgtcagcgcccctggtacaaacaggcagtagctgcagacaaacccatgcttacgccaccctatatggcagcggtgggtgggcagatcgtgaccatcgccatgccggtgaaaaagaacggcgagttgctcggtgtggtcggcggtgacctgagcctgcagaccttggtgaagatcattaactcggtggattttggcggcattggccatgcgttcctggtcagtggcgacgggcaagtcatcgtcagtcccgatcaggaccaggtgatgaaaaacctcaaggacatctaccccggcacccaagtgcgcatcgagaaggtcagtcaggacgtcgttctcaatggccaggaccgaatcttgtcattcacccctatcagcggcttgccaggcgcggattggtatatcggcctgtcgattgataaagacaaagcctacgcaccgctgggcaaattccggacatctgcgttgattgccatgttgatcgccgtggttgcgattgccgtgctcctgagcttgctgattcaagtcttgctgcgacccctgaccactatgggcgtggcgatgcaggatatcgcccagggcgagggtgacctgacccgtcgtctggcggtcaccagcaaggacgaatttggcgaagtcggcagtgcgttcaatcagttcgtagagcgcatccatgcgtcgatttcggaagtgtcctcggctacgcgccaggtgcatgacttgtcccagcgtgtgatggcttcgtccaatgcgtctatcgtcggttccgacgagcaaagcgcgcgcactaacagcgtcgccgcagcgatcaatgaactgggtgccgccacccaggaaatcgcgcgcaacgccgccgatgcgtcacaacacgccagtggtgccagcgagcaggccgacgatggccgcaaagtggtcgagcagaccatccttgccatgtcggagttgtcgcagaagatcagcttgtcctgcacccagattgaaaccctgaacgccagcaccgacaacatcggtcacatccttgatgtgatcaaaggcatctcccagcaaaccaacttgctggcgcttaacgctgccatcgaggcggcccgagccggtgaggccgggcgaggctttgcggtggtcgccgacgaggtacgtaacctcgctcaccgcacccaggagtcagccgaggagatccacaaaatgatcacttcgctgcaagtgggctcgcgtgaagcggtgactaccatgaatgccagccaggcctccagcgaggaaagcgtagaggtcgcgaaccaggccggtgagcgcctggtcagcgtgacccagcgaatcgttgagatcgacggcatgaaccagtccgtcgccgcagccactgaagagcagacggccgtggtggaaaccctcaatgtggacatcaaccagatcaacttgctgaaccagcagggcgtggccaatctcaatgaaaccctgaaggattgcgatgccctgtcgcagcaggccaatcgtttgaagcagttggtcgatagcttcaagatctgacccgctgattcattggcaggggcgcatcgcgtcgctcctgccgcttagctgagtattcggcggacattgtccagggcgctgttggcgaagtcttgcacaaactgttcgaaccctgtgttcgccgtctctgtgggctctgcaataattgtccacatcaccttggagcgctccgcttcaagtgcttccacttggatcgccgcccatagtctggccacacccagggtgttgtagatcgtggtccaggtcatgtgcatagcctgttcattccggctattgagttgctccactacacaattgccatcgcggaagaattttgtccgcaaggcgcccacgcctgagcccatcatttcgatatggctcaagtccggaatgaacatatcgaagccggcaaatcgccccaccatgtcccacaggcgagaggcggaacagttgaccacaacagaagccactatcggtagaccactcgggttgcggattaacgtatcgggttgcagcagtttcatgaggttgtcctggggtgttcaaagaaagccgatggccttgaggtaattgcagcctttgctcaacagtgccgtgtcctttgcggggtagtgttcacccatctgctggacacctagtcgcgcgttgtcgtaacgaatcattgaagtgtccccgatgtcttcgtcgaggcggtcgaggtaaaaaccgagcacgccaaacagtgcgttgtcctggcttaccgttcgcagcgcctgctgccattgcgcgatgcccactcgcttgaagcgatggcccgcccgactgaacgcatccaggtagtgcgcccagctcaacggttgtgggttatgcaggttgaacacactccggctggcatgaaagcgggtgctgtggaatgcaatgaagcgcgccagaaagtccaccggcatcaggtcgaagttcagcgccaaacggggcagcaggcccagctgcagtgaccccttgagcatcagcatcaggcgatttttttgcggctggcacgcaccgttctggctgttgaagctgatattgccgggacgatggatattcacccaggcaccacgcgccaccgcatgccccaattgccgctccgcaacccatttggataggttgtagccattcttgatgtacagcggcagcgtggtagaggcgggtgattcgaggacatagccctgcgagtcgacactgctcgaggccgacagtgtcgagataaagttgaagactttcttgcggtgggtttcacacaagcgcaggcattcgcgtatggggtcaacgttgtcccgcgtcagtgatgcatagtccatcacgtgattgacccgcgccgcgttgtggaccagcacgccgaagtctctggcgagagactcatacacaacgtcagccaggcccaatcgaggttggctgatatcggccgtatataccttcactcggctcaggtccacatgctccaggcggtattcatgtagcgcctggatgagtcgtgacattggcgaccgccccggctcctcccgtaccaggcacgccacctcggttgcaccagcggccagtaacgcttcgacgatatggacacccacaaagctgttggctccggtcacgatcactttgtgcggatcacctgcacggtcctcaggcaacgtgtcgagcacccactccgattgagcatcacgggccgcgcggccagatcctgcatcgggtcgttcaccgttctccaccagcgttgcgagcgtacgaatcgtcggcacttcaataaagtgactcaacacaaagctacggccgaactgctcgcgtacgcgcagcagcaaggtcgatagcaaaatcgaatgcccgccgagatcaaagaagctctggtcaatagatagattacctgcgggcaccgccagcaactcgctccacaagcgggacaaccgaaggtgaagcggagtttttgcggtactgccgacagcttgcaacgcagaccggaccggtagtgccagcaatgcctgccggtcgacttttccattgacggagcacggcaggtagggcaagacctcccagaagcccggctgcatgtagtctggcagccattgccgtgcatggtgcttcagggcggccacgctcgcgtgtggttcaggctgggcgacgtagccgcggatcctgctgtcccggtcgattactaccgccacctggcgatacagccgactatcgcgcagacactgctcaatctcctgcggctcgacccgaaaaccgcgaattttcacttggtcatcgcgccgcccacccagcacgatcccgtcggcggtccaccgtgccaggtcgccactgcggtaggcccgcagtggcggagctcctggtattgccagttccacgaaaggactggcacgcggctgcgacgtgcccacataccccaggctgactccggggccgacaatgtacacctcgcccattacctcttcatccaccggttgcagagcgtcatcgaggatcagcacctggctgttggcgatggggtagccgaggttgcggttgcagtcaccggggtgcagtgtccgctgggtgatcagcaccgtggtctccgtagggccgtagaggttgtgaaaccggcactgcccggccaggcgttcgatgacatggggttcgcacacatcgccgccggtcagcaggtgcgtcaggcccaatggttgatcaagcggcagaatgctcagcagcgcaggcggcaaaaaggcatgggtgacgtgctgctggtggagcaaacccagcagttgttcaggggctcgccgttgctcggcactggggacgatcaattcggcacccgctatcagggcagggaaaatatcgatcagcgatgaatcgaagctcaacgacgaaaactgcaggactcggctctggtcatccaggttcataaaggagctgaaccaggccgtgaaatgcgccaggtttgcctggctgagcagcacgcccctgggttggcctgtggagcccgacgtaaagagcgtcatgcagggcgcatcagggtgggggcgagctggcatcaacgcaagcgtgaggtcgacatgccgaaggtcaggacgggtgacatccagcgcagtgaagtgcgctcgcaaaggatgttggccggcgtccagcaacacacgcgccccggcggtctcgagcatgacttgatggcgttgtggcgggtggtccgggcccagcggcagatacaccgccccacagcccagcaccgcaaggatactggcgtacaactcgatggatttttccaggcacacgccaaccacgggcggggcctgcgtattgcccaacaaggggggtaactgttgctggatcgtgagggcctggacgtgcagctcgcggtaagtcactacgctaccggcgatcctcagcgccggtcgatccgcaaacctatggaggctcgcctgcaccctttcgatcacgggcacttgggcttcgcgcattaccgcgggatcttcggtacggttgaatcgatggacaaatgccagcgcatcaagcgcgtccaacccgtgctctggccagtcattggcaacggcactctcggagaaatacccagggtcccgcgagaaacgactgacgtgcagcgcgacccattccaccaatgcgtggctcacttgctggcgtaaccgttgcccgttgcccgtgggctcttcggcgatgtccagggctcccgacaagcgccggttggccccataggcgcgcagctgcagcgggggtagtccgcagtcggataccgggccaacgcccaggcgcaggctcaacgcagagattgggtctgccgggtcccgcagcggctgacatccgtcatctatccacaggtcgacgccttcatcgctcgagacatgcccatgctgttccagctcccgtctgatggcgtccaaggcgctgctggcaccggaaaatccgattgtcaggcgcttcatgtcgcttccccgggcatcggcaaatagtctttcaacgcgtgcaccacactcggcgtctgcagcaaaccgctgtgttgcaggaagccaaggatattgctcaacagcgggtgccggcgagtgatcgggaaggtgagcgcggcgatttcattgcgcaacgcgttgcgcaggctggcgtcgatatcgaggtgttcgatcaagtgaaggtcaaagtctttttgcagatcgttcgtcagatactgagccaggaacgccggcagtaccttggcaatactgtcgcgatcgtccgcgttcgcggcttgccaatacaggcgtacaagtcgcgtccagaattgcgcgtggcggccttcatcaaacaggtggtcggccatcaagccacggatggaggctttgacactgctgtccttggagaatgccgctacatcatgggtcaccgtgttttcggcgatggccaccgcaatcagttctactgcatcgtgcagatgggctggcgcctgggcttgtgctgtcggcagtgcgcggctcaattcgatttgcctgggcagctccaacggctgtatgccggtcatggccacggtttgctgcaggaaatccagtgcgaccagcgcgtggtagtcctcgtccacgacgacggtcatcgcatcaacgcggcaggccagcgggaaggggatcgagaagcggttcttggcaatgctgcgcgcagtcttgtcgacgatctcggtctcgaatatcaccacgtcgttgatgaacttgtagaagctctgcaccagcacgaaatcgcgccactgcgggcagtgttcgagaaaggtcgcgctgagtaccaagggctggcggcacagtgggtaaatcagcttgtcatcgttttccagtaagcggcgaggacgtgtacggatggttgcacggcgctcccagtcgtcggcaatggatgtgtagtcgccggtgttcatggacgcacctcttgcaacgaggcctgaacctcatcccagagcgcgatacggccttccatggcggcaagggctgcgtcgtgggcctgttgcgcgtgcgccgggtcagcgctgacgaggcgttcgagcagctgctcggcggccggcccatggtcctgggtgtccatctcgatgtgacgcttgaggtaagcgcgcaaggtaggcgcctggcgatggatgagttcattggattgcaggatgcgctggaacattgccgggatgacgtgctcgcgtccgtgcaggaaggttgcagccacacagtgggtcggtgcattcagcgcgaggttcaaggtgtcgctgacgaagcgaaccacgccaggaagaacctcgacttcctgtaaggccgcgtgtgcttccaggccttggcgttgcagtgtaataaagtggttgatagacgcggtgttggcacccacttctgccatcgcctccaagtacagttcgaagtggctgcaataacctttcgcgggatgttcgtctgactcctcgcctaatacgatctcgttgatcagacgtgcggcctgcgggtctggcggtggcagccaaggcaggcgcgtacaggtcaaatcctgttgcaggcgtttggcgagggtcatgaagtcccagactgcaaatacatggctttccatgaaaagttgtaactttcgtacggaagttgtttctgaaaataacgaatgactgcataactgcagttttgctgtttcaagtaacggttgatgcatggttgatgcctatgagttgttgcgtctgctgtgtaagcagcgatgaattttttgtggttggcaagggctcagctgttgttaaaaggctgctggcgtgcgggatcgctgaatgtgaaggatgtcggggctgttaataaaatataataagcgggttaaacaagttggcgaacatacaaatatgttagaagtttttctaaataatattgatgtaagttggattctttgttgtaagtgggaagtttccttggggcgacgcgctaaccgtgagtcaggacgccccgccaccggaaaggtcggggcaggagagccgtgtgccttattgcgtatctttgttgccttgggcgtccaggccactgaggtacgccgtgatcacttccatgccccgcatcaagtgattgcgcagtgtcaggatgctttcctgggttttcttcttggccaccaggttcagcagttcgcggtggtcttcctgggacgtctcgcccagccccatggcctcaaggttgtaacgcaggaaacgctcctcttcgttcaacccgtgctccaccaatttgagtagccgctggttcggggccctgccatataaggccatgtgaaacagtcgattgaggcggcccatttcggcgtagtctttttcctgctcaagagcacagatgattgcgtccgcctcggcaatatcggcctcggtgagtaaaggaatcgacaagcgcagcgcttcagactccagcagcattcgcagttcataggtttcggccgagttatcctcgatcaagggtgcaaccacggcgcctttgtgcgttaccacatgcagcagtgattgggcttccaactggcgcaaggcttcccgcaccggcatgcggctgactccgaacaggctggccagttcctgttggcgcatagcggtaccgcagggcaatcgaccatccaggatggcgttgcgcaaggtttcttcaatcacggaacgagcaagatgcgcgggaataggaccgcttatcttgatgctgttcaaaggggtcggcttgtgcgtcacggttacgctatcctcctttttctaattgggtggctaattggatccaatgcacactagagactgcccataagcttgtcaaacgagcacggtttcggcttgtaagcggctcaacatcatgctcccagcgcccacagccggtatttatggcgtcttacgcaaccaggttcattgagcctgcttcagcagttaccaatggcaacagcagcagctatggactcaacactttaccgttgcagtttattccccaagtgccaggaggtatgagttctcatggcactttcccgtatatagatattcattatcagtatttaaactgaggttcttatatctataaagtcgctctcctgactgaccgggagtgacctcatgtccgccacctctactgttccaacagcgaccgccaccgcccaaaccttcgagattctgcctttttccggcagcgtcggtgcccagatcattggcctggacttgtcgcgcccggtcagcgagcaggattttgcgcgcattcaccgtgcgcacctggaccatcacgttgtggtgttccgtgaccagcggatcacccccgaacagcagatcgccttcagtcgccgttttggtgtgctgcagatccacgtgctcaaacagttcctgctggccaaccacccggaaatcctgatcgtctccaacatcattgaaaacggccaatccatcggcctgggagacgcaggcaaattctggcattcggatctgtcttacaaagagctgcccagcctgggctcaatgttgcacgcccaagaactgccgtctgaaggcggcgataccctgttcgccgacatgcacaaagcctgggaccagttgcccgagcacctgcgtaaagctgtcgagggccgcagtgccgcacattcctacaccgcgcgttacagcgaaaccaaattcgaaggcaactggcgccccacgctgacccctgagcagcttgcccaagtcgcggaagtcgtgcaccccatcgtgcgcacccacccggaaaacggccgcaaggcactcttcgtcagtgaagggttcaccacccgcatcgtcggcctgccggaagacgagagccgcgacctgctggcccagctctacgcctacagcgtgttgccacacaacatctaccgtcaccaatggcagccccacgacctggtgttctgggacaaccgatcgctgatccacctggctgccggctgcccgagccacctgcgccgtaagctgtttcgcaccaccatccagggcgatgcgcctttctgatccccatttgcgccaagtgagatgaaatgaacatgcccctgcaaggccacgcggccagcactctgaacacggcgcagccgctgctggcggtggataacgtcagcctggaataccgcacgcccgagcgggtggtgcgggccacccaccaagtgagtttcgagatcgacccggctgaccgctacgtgctgctcggcccttcgggctgtggcaaatccaccttgctcaagtccatcgccgggtttatcaaaccctgcgaaggcgagatccgcctgttggggcaaaaggtcgagcaacccggcccggatcgcatcgtggtgttccaggaattcgaccagttgccgccgtggaaaaccgtcaagcagaacgtgatgttcccgctgctggcctcgaaaaccttgaagcgcggcgaagccgaagaacgcgcgctgcactacctcgacaaagtcggcctcagcgcctttgccgatgcctatccacacaccctttccggcggcatgaaagcccgcgtcgccatcgcccgtgccctggccatgcagccgaaaatcctgttgatggacgagcccttcgccgccctcgacgccctgactcgacgcaagatgcaggaagagttgctgctgctctgggaagaggtgcgcttcaccctgttgttcgtcacgcactccattgaagaagcgctggtagtgggcaatcgcatcctgttgctgtcgcctcatcccgggcgtgtacgtgcggaggtccacagccatcaatacgacctgcacagcctcggggacgtggcgttccaggcatcggcgcggcgcattcatcgcttgctgttcgatgaagcgcccgaggttgaacgtgagttgggtttcgccgatatccgcatcgcttactgaagggtcaacccaatgcgccaggaatttgaaatctccctagaaccgctgctcagtgtccccgtggaacgcgagttgcccttgcgtcaacgcctctggcaacaaggctggctgcgcaaaggcctgatcctgattgtgctcgcggtcctctgggaagccgttgcgcgctaccaggacaacgacctgctgttgccgagtttcttgcagacctttcacgcgctgtacgacggcctgctcagtggtgaattgctcagcaaagtcagcatctcgctggccgtgctgatcaaaggctacttgatcggtatcgtgctggcgttcgccctgaccaccctggcggtgtcgacccaactgggccgcgatttgctcagtacgctgacttcaatgttcaacccgctgcctgccatcgcgttgttaccgctggcgctactgtggtttggcctggggcagaacagcctgatcttcgtgctggtgcattcggtgctgtgggcgctggcgctcaatacctattcggggttcctcggcgtgtccgaaaccctgcgcatggccggtcgcaactatggcctcaagggtatgcgttttgtgctgttcatcctgatcccggcggcgctgccgtcgatcctcgcgggcctcaagatcggctgggcgttcgcctggcgcaccttgatcgccgccgagttggtatttggtgccaccagcggcaagggcggcttgggttggtacatcttccagaaccgcaacgagctgtacaccgacaaggtattcgccgggctggcggtggtgatcctgatcgggctgctggttgaaaacctggtgtttgatacgttcgagcgtctgacggtcaagcgctggggtatgcagcgttgatcccacgaggccataagaatcgtcgcttttaaataggaatggttgctctttgccctgtctggcttcgataatcccgtccgaattcggcgccgcgatggcgtcgaaccgttctggtaaagggatttacgacgatgcgttttcttgtcttggcagcggctgtgttgttatcgacctcggtgttggcggagttcgtacccgaagcagtgtccatgcccaagccgcaatacccggcgttcctgacgtcccttccgggacatgcgcgcatcagcttgaacatccacagtgatggttcggtcagcgatgtaaaagcgctcagcgccaccaagcctgagttcggcgcagccgccgtggcggcggcccaacaatggcgtttcaaaccctgggcggtgaatgcagaccagccagcggtgatcgacgcgcagaacgaaatgatcttcacgcctgaagaggtcagggcaacgagtactcagctgtcctttatggaaacgacctatcagtcctgcagcgcgttgaacgaagaagtcagtcagttccgccgtaatcatccttcccgtccgctcatccagatgaagagttttgccatcacccgtgtcgctgtgatgttcccggcattgagtggtaaaagcggctacgacgaaggcctgacccgggccgacgaactggaaagcgcgctgccggacatcgtgcgcaagtgccaggcgcaccctaaatccaccttcgcaaaatacctgcccgtcaaactgaggcgctatctgtaaagcctgctacgattgcgctcacttcacgccccgctgttcacgagttcctggcatgcaactaccggacatgaacctgctggtcgctctcgacgccctgctcgatgagggcagcgtagtgggcgccgcgcgccgcatgaacctcagccccgcggccatgagccgcacgctcacgcgtatccgcgaagcggtgggcgacccgatcctggtgcgcgccggtcgcggcctggtgcccacgcccaaggccctggagttgcaaggccaggtgcgcaacgtggtagagcaggcggcgctgctgttccgctcggcggaccaggtggacctgagcaccctgcgtcgccgtttcagcgtgcgcgccaatgactttttcattggggtgtatggcgggcgcctgttcgacaccatggagcgcatggcccccctgtgtgagctgtgcttcgtgcccgaaggtaataccgacgacgaggccctgcgcgaagggcgcctggacctgcgggtgagcaacaccatgcccgccagccccgaagtgaaagtgcagaacctgttctccactaccttcgtcggcctggcgcgggaagaccatccgttattcgatgaggaaatcaccgctgcacgtttcgccagctattcccatatcagcatctcgcgacgcggcattgcgcgggggccgatcgacaccgcgctgaatgcccagggcctggaacgccgtgtggcgatgatcgcaccgggctttcacggtgcaatgttcatgctgcccgattccgacctgctgctgccggtgcccaaggaagcgctgctgagcgcgacgcgcctgaaactgccactgcgcgccttcgccttgccgatctcgttgccgacgctggtattggcccagtcctggcacccgcgcttcgacaaggaccctgcccacaaatggctgcgcgaaaccatgcgcgaaagttgtcacgccacgtggctcgaagcgcagcccgtctgatagttgcgtttggcgcacttatacccttccaacaagtaactttttgtcatgtgtgtgcctgattaaactgctcgggtattgatcattccgagttgcctgtccatgacgtccctcgctgcccccacccttgcggccgcagccaaacccactgccatgaccccgcccgtattcggcccgcgcatcatcattggcctggtcggcgtgttgctggcggtgctggtctccggtctcaacgagatggtcaccaaagtggccctcgcggatatccgtggcgcgctgtacatcgggtttgacgaaggcacctggctggtcgcggcctacaccgccacttccgtggcggccatggcctttgcgccctggtgttcggtaacgttttccctgcgtcgcttcaccttgtacgccatcgggttgttcacggtgctcggcatcctgtgcccgttcgcgccgaactacgaaagcctgctggtgctgcgcaccgtgcaaggcctggccggtggcgcgttgccgccgatgctgatgaccgtggccctgcgtttcctgccggccaacgtcaagctgtacggcctggccggctacgccctcaccgccaccttcggcccgagcctcggcacaccgctggcggcgctgtggaccgaatacgtcggttggcagtgggcgttctggcagatcgttgcgccgtgcctgctggccatggccgccgtggcctacggcctgccgcaagacccgttgcgcctggagcgcttcaaacagttcaactggcgcggcctgttgctgggcttcccggcgatctgcatgctggtgatcggcattctgcaaggcaaccgcctggactggttcgagtcgggcctgatcaccttcctgctgtgtggcggcggtgtgttgctggtgctgttcatgctcaacgaatggtcgcagcccatacccttcttcaagctgcagatgctcggcctgcgcaacctctcgttcgccctgattgtgctggcgggcgtgctgatggtgctgacctcggtgatcatcatcccgtcgagttttctcgcccaggtgcagggttaccgtccactgcaaaccgcgccggtgatgctgctgatggcgatcccgcagttgatcgcgctgccgttggtggcggcgctgtgcaacctgcgctgggtcgattgccgctgggtgctggggatcggcctgggcatgctggtgctgtgctgcgtgggcagtgcgcacctgacgtcggaatggattcgcgacgatttctacggcctgtacctgctgcaaattttcggacaaccgatggccgtgctgccgctgctgatgctctccaccggcagcatccagcccatggacgggccgtatgcttcgtcctggttcaacaccatcaagggcttggccgccgtgatcgccaccggcgtgctcgacaccttgaccacccagcgcctgcacttccactcgaccatgctggtcgaccgcctgggcaattcgcccctggccgacggcgacgcgccgggcctggcgcaccgcctgcacgagcaggccgtggtgctgacctcttcggatctctattacgtcatggccgcagtcgcggtggcgttgatcctgctgattttctggatgcccacgcggatctttccgccgcgcgcaccgacttgattgaaaggactgttcatgaaacgcaaagacaaaatcgccgtcaccgtcatcgctgtatttgccgttggcgtgctggtgtacctggtcgcgccgagcgtgctgggcagcaagcgccagaccaccaacgacgctttcgtcgccgctgacttcaccctggtagcaccacgtgtggccggcttcatcaaggaggtgctggtggaagacaaccagcgcgtcaaggccgggcaattgctggcgctgatcgacgaccgcgatttccgcgccgccgcccaggccgccgatgccgacgctttggtcgcccaggcccaactgaaaaacgccaccgcgaccctggagcgccaaagctcggtgatcgcccaggcccaggccaccgtcgcggcggaccgtgccgaaatggctttcgccgaacacgaactgaaccgctacaaccacctcgccggtgtgggcgccggcacggtgcagaacgcccagcaagccaagacccgcatcgaccaggccactgcgcgtctggccaacgccacggcggtgctggcggccgaacgcaagcaagtggaaattctcaccgcccagcgcgatgccgccgaaggcggactcaagcgtgcccaggccgcgttggaactggccagttatcagctgtcgtacacgcgcatcgtcgcgccggtggatggcatggtcggcgagcgtgcggtacgggtaggcgcctatgtgacaccgggcagcaagatccttgcggtcgtgccgctggaggaggcttatgtggtggccaacttccaggaaacccagctctcccatatgcacgccggccaagcggtgcaggtgcgcgtcgacagcctcgatggtgagttgctcaacggtcatcttgaaagcctcgcgcctgcgaccggggtgaccttcgcctcggtcaagcccgataacgccaccggcaacttcaccaaagtggtacagcgcatcccggtgaagatcgtcctcgaacccaatcaggcccacaccgaacgcctgcgggtcggtatgtcagtggaagccagcgtcgacacccgcccggtcgcgcagcagcgtgaggtcgcccagcaatgaagcgagttgcctggctcaccttgagcctcatcagcctgagtgcctgcacggtcggtccggatttccacaagccccagggcccgccagtgacgcaatggagcgagctccaggggcgccaggcggccagccgcgccgtcagtgatcccttgcaggaacgctggtgggatgtgttccacgacgagcagctttcggccctcacacgccgtgcgctcaccgataacctcgacctgaaactggccagcagtcgcctgcaacaaagccgcgctgtacgccaggtgacgaccgccgagcgttatcccgaggttgatgcgacgggggcttaccagcgcaaacgcaacagcggcaaaggcctgagcgacccgtccggcgagaacggccgtgcggcgttcaaccagtgggacgcgggtttttccgcctcctgggagctggacttctggggccgggtaaaacgcgaaaccgaagccgccgacgccaccctgcaagtcgccgaagacgaccgccgtgccgtgctgctatcggtacttgccgagaccgcccaggactacattcaactgcgcggcgtgcagaatacccgcgctgtcaccgagcagaaccttgatgtcgcgcgccacagcctcaagctgtcgcaattgcgcttggccgacggcgtggcgaccgacctggatgtcgccgaagccgccgcccaggtcgccgccatcgaggcgcgcttgccagacctgcaacagcgccaggaccagctgatcaacgccctcagcctgttgatgggcgcgccgccgcaagcgctgcacacgcaactgtccaaggacgctgccgtgccgcaaacccagcgccaggtcgcgatcggcctgccttcggaactggccgaacgccgcccggacatccgccaggccgaggcccgcctgcacgccgccaccgccagcatcggcgtggccaagggcgacttctacccgcgcattaccttgtccggcagcctcggctcccaggccatgcaactctcggacttcggttcctggagctcccgcgcctttgccttcggcccgcagttcagcctgccgctgttcaacggcgggcgcctgcaaggcatgttgaacctgcgcgaagcccagcaacaggaagcggcgcttgcctaccagcaaaccgtgctgcgcgcctggcatgagatcgacgaccagttgacccgctacaacgccagccaactgcgccgcgacagcctggccgaagccgtgcgccagaaccagattgccctgcgcaccgcgcaacagcagtacgtggaaggtgtagtggatttcgtcaacgtgctcaccgtgcaaagcgcgctgctggcgacgcaggagcagtgggtggaaagctcgaccggcgtgtccctggcgatggttggcttgtataaagcgttgggtggcggctgggaatcggtgtatccattgcgcacggtgggtgcgggtcaggttaccgattctgcaaaaacaccacgtacccccgaaaccactcgctcccctgcaaataccccggcgcttcccactctccaccctgaatcaagccgatcttgaacggcagccccatccgattcatgcgtggcaagtacgccgcgtaatccgggatgctatggcgcccctggtacgtctgcaccaccacctcatccaccacgcccttgagttgggcgatggcagccgggtcggcgttgctgctccagtccatcaggccggtgatgctcaggcgcaggtcggccggcaaacgccggcgcaggtcgcgcaagaacccggcgtattcgtgcaggtattgggtgcgcgcatcgaagtcgatctggataccgactaccgggttgcccgcgtcgcgccagcgttgcacctggccgagcagttggctgtagaccggctcgggccagcgcagggtgtgcgcgcggtagacgatccagatgtcgccctggatcaggcggggcacgctcataccctgggcgatcatccgcacgccacgctggggcgcgcggcgagtcgagttgatctggccctggaggatgtacagggtcttggcctgcttgagtaccggctgtggggtaacgccactccacagccagaaggcgtcatagtcgcgggcgtcgacggcgccgaaggccgggcttgccagtagcagcaagccgagccacaggtgtctcaccagtagtactgcagggacttgccccactgggtgtcggcgaagccggttttcaactgacggaaccacgccttgcgcacggccggctccacatcgacgccgccgcaactgttgtagcccgatggcccatagcagttgatcgcacggaacagcgcgtaggccttgtcgttcttcggcgccttggcgttgccgatcacctgtttgtagccgtccaggcgcgagaaggtttcacccttgaagtccgatgcggtgctgcccaggctgccggcggcgcgtgcctgttccagcggcatgccgtccaggccgttgcgcaggatgaattcgcccaggcagttgaggccctgtgggtttttggcatcggcctgcaaggttgcggcgatctgcgcgatgctcgggcaggcgtagccggactcggctttgtcgccattccactggaacagcttcaaggtctggctgacgctgtagacgtagcccaggctggtgcccagtttgtcttccggggcgctggccggcagttgcttgaggtcgtcggcgaaggtggcgaactggccgcgcagcaggtctttgtagagcagcacgaattgtgcggtctggcgttccagcgggtcgctggcctgggcgatctgctggcgcagcagctcagggccggcgacgttgcgcagcaggatataacgcacctgtttggcgctgatcggcgagtcggcggcgaacaccttggctaactggccgctgcgctcgtagttcatcgccagggccagctccagctggtcgcgttgcagtggcaatttcgccagcggcagcagttgcagccagagggcttcggcgcctttccagtcttttttctcttccagggcgagggcgcgcagggtctgttggctgaaggcgaaataagtcaggttcgacggtacgctttgcggcaacagcttcaaggcagcatctggctgatgctcgctgtacagcgcattgaccgccagcaggtagtcatatagctctggcgcattggcgaatgcggctttttgcttttccaggtcggcgcgggagagggcgggctggtcgccaccgcgcatcaccatcaagtcactgacaaactggatcatcggtgtactgacggtttcgctgttgaccatcagcagcttgaggtcggcttcctgcaccagctcatccaccgacacattgcgttgtgtgtcagtggcctgggtcatggcccaggcgtaggcttcggcgagtttgctgttgtcatcccccagccaataaacccgccgcagcaggccacgggcggaggccacgtattcgccctttggataagcctccaggtagccgagaaaaccttgctcggcatcgttcaaggccgacttatccacacgcgcgagttgcggcatgccgtattcgtcgaaggcttcagcctgggcctggttcaaggacgtgcgtgcggtcatgtacgacgcagcttccttcagccaaggcagattgctggcgccggcagcgataaaaccccgttcggcgtcgccgaagcggccgctgtagaaatcggcggcggcttgcaggtaggtacgcatcagttggccatcggcggactgaatctgctgcgcgtccaccacctggccttcccaggagcaggcggtcagcagctgcaaacgcgccttcaccagcaactcgcgctcggctgccggcatgtcggccttgatcacctggctgatgaacgctgtggcgctgtcatcgtcgttgctgcggcagcggctgccttcgccactcagaaacgcttcccccgcagttttgtagtcgtcgcgcttgatacccaggggctggagcagcgtgtccagttcggcagtgcgcgagtcgtcgggcttgttgtccggttcctcgttagtgctcggaatcggcgccaggcgatagaccgcaaagggcacaggaccaaaaccttgggacagatcgtcttcgctcaacgcgttgggtgccaggggcgcggcgtttttgtcagccagcaacaggcgcaggttgacgcgactgtcgttgccggggctgaggaagggcaggttgctgcacgaatcgaggctgtcacgcgaaacccgccagtcggggtagcacgagtcgtcggagctggcctgggcctgttgggaaataccggcgagcaatgccagtgccaggggtgacagaaaaccgatgcgcatgacgtgtccttgatcctgagtccttggaggggcgcaataatagcctgttcctacggttgcttcggagaagccctgcacaaattgctgatttgtccgattccagcggcggatcttgggcttttgtcctagagtggcggtgtttgcgcttgggcaatcaggggaattgaggtgcgtcggtctgtggtagagcaaaacgaaaaggtcgggacgttaccggcactcaatcgcctcacgtgggaaggcgccggctggatcagccgtctctggtgggtgccgatcctggcgctggccatggccctgcgcttttaccaactgacggcggcggcgatctggggcgacgaaggctcgagcctgctgctcagtgaatacgccgtgggcgacctgtggtttcacgcggcgcacgacgtgcacccaccgctgtattttttcctgctgcgcggctggatcgaactgttcggcgacagcatctggtcgattcgcggcatgagcgccattcctggtgtggtcgccgtgggcctgggcacctggctcacccggcaactctccacccggcgcgcggcggtgctggcggggattctgctggcgctgttgccgaccgcggtgcgttacagccaggaagtgcgcatgtattcgctgctcggcgtgtggctgctgggcgccacgctggcgctggtgtactgggtgcgccaacccgagcgcacgcgctatctggcggcgtatgtcgtgttgatgacggccggtttctacacccattacttcaccgcgctgtgcgtgctggtgcactgggcttacctgggtgtgttgtgtggtacggcgccgcaaggccagcgcctgatcacacgcccggcctggtgggtggccaacgctgcgattgtgctgctgtacttgccgtggctgccgaacctgctggacctggtacagcatgtcgaacagctcaaggtggggggcgacatcggttgggaagatcccgtcagcctgttctccctgccgtcgatgatctggcagttcgtgctgcaggatgaaggcgtcggcttctgggcgccgttgttctggctgttcccgctgctgctggtggcggttgtcgtcatcacggcctggcgtgatcgcgagcgccaccgaccggccagcctgatggtgctgttctttctgttgccgctgctgctggtctacggcgtgtcgtttgtttccccggtatttatcgagcgttacctgacggtatacgccctgggtttgccgattctgctggcgatggccatcgaccgtctgccgtcgcggtttgcactgctgggagcggcgttgttcgtgctgtttgtcggtgtagagctcgtggggttgaagaacaatttcaccgtggatgagcacgaccaattcaacgtgccggtggagttcgtcaaccgcaattaccaggaagacgaccgcatcgtcctcagcgacatgttgtggtacttgagctacgtgtattacgaccagaccgatgcccaattgcagctctacaccccacccaagccggatggcacctcaacccggccgaatgcctacggcttcggcaccctggtggaccaggacggcgggcgcatctacctcgaccgcctgtcggcactgcccgccgaaacccgccgcgtgtggctgatcagcagtaacgaagccccggacgatttcgccccgctgcccgaaggctggcgcgaactcagtcgccaggatggcggaggcgccagggcgcggttgttcgtgttgtgcaacgtcccgtcggcgcaacccgagggctgccgctagactgggtgaatgcttttctatcaggagcccgtcatgcaatcgcccgtacatagcttgccgtcactgttcaaacagctcgggttgccggatgacccggtgagtatcgagaaattcgtggcggtgcattcaccgctcaagccggatttgaacctggcggatgcgtttttctggacggacagccagaaggcgtttttgcgcgaggagattctggaggatgcggattgggctgaggtggtggatgagttgaatctgatgttgcggggtgggcgaggggtgcaaaaaacttagcagaaagggcaaaagttaaaaaaatctggtgaaggttaaaaaaatctgaggttttaccgcgttagtgaactttttctgacgcaagggcctgggtttgatggccggaattcagtactggcccccagacccgctttacttacccctaccacccaccacccatccgcaaaattgtttcaaaacttgacgcgataggatccatccaccatattgatagttagcaaactaactgtatgcgaactatccagtgcctcaatccctcgaacaactccagatgaacctcagcagcagcatggtggtgggcgcccgtaactggcgcaaaatctgccagaccacgctggtgagctatggcatctccgaagcctgcgccgtgccgttgttgatgatcggccgcctgggcgacggtgtgcatcaggtcaaagtggcccaggcctcggggatggaaagcccgtcgctggtgcgcctgctcgaccggctgtgcagcgacggctatgtgtgccgcaccgaagacgtacacgaccgtcgcgccaagtccctcagtcttaccgagcgtggccgcgagttggtgcaagcggtggaagagcaactggtgcgcctgcgcaaggacgtgctggcagacatcgcccacagcgatatggaagccgcgctgcgcgtgctgcgtgctttcgaggcggcgtcgctttgaacggattttttaccggcttcccacccgcccgcgattggttttacggggtgcgcaccttcgcggcttcgatgattgccttgtacatcgccatgctcatgcaaatgccgcgtccgtactgggcgatggcgacggtgtatatcgtttccagcccgtttgtcggcccgaccagttccaaggcgctgtaccgtgccatcggcaccttcatgggtgccgcggcggccgtgctgttcgtgccgatgttcgtgcagtcgccctacatgctggtggtggtgatcgccttgtggacgggcacgttgctgtttctgtcgatgcacttgcgcacggcgaacaactacgcgctgatgcttgccggctacaccttgccgctgatcgccctgccggtggtggataacccgctggcggtgtgggatgtggccgaagcgcgcaccgaagaaatcttcctcggtatcgtggtagcagcggtggtgggcgcaatgttctggccgcgccggctcatgccggtgttcgatggttcggtggccaagtggtttgccgatgcccaggtctacagccaacgctttatcacgcgaaatgtgcagcctgaagaaatcagcaccttgcgcggcggcatggtcgccaccttcaacaccctcgaattgatgatcggccagctgcctcacgaaggcgcacggccgcagacggtgcgcaataccaaggagctgcgcgggcgcatgatccacctgctgccggtggtggacgccctcgacgacgcgctctatgccatcgaacatcgcgcgccggagttcctcgataaaatcacgccgctgctggaagcgaccagccagtggctggaggacacccaagaagcggcgccgatggaacgctggcgcgtcctgcgtgaccaggtcgacgccctgcaaccgagcggcgaagcactcgatgatcgtcatacgctgctgttctccaatgcgctgtatcgtctggccgagtggatcgacctgtggcaagactgccgcagcctgcaagccgccatccagtgcgaaagccaggacacctggcgcgccgtgtaccgtcactggcgcctgggccggctcacgccgttcctcgaccgtgggctgatgctttactcggcgttttccaccgtcaccgcgatcattgtcgcgtcggtgttgtggattctgctcggctggaccgacggcggcagcgcggtgatcctggccgccgtcgcctgcagcttttttgcttcgatggatgacccggcgccgcagatctaccggttttttttctggaccgccatgtcggtgctgttcgccagcctctatctgttcctggtgctgcccaacctgcatgacttcccgatgctggtgctggcgttcgcggtgccgttcatctgcatcggcacgctcaccgtgcagccgcgtttctacctgggcatgttgctgacgctggtgaatacctcatcgttcatcagtatccagggcgcctatgacgcggacttcctcaacttcgccaacgtcaacctggccgggccggtgggcctgctgttcgcctttgtgtggacgctgatcgcgcggcctttcggcgctgagctggcggccaagcgcctgacccggttcagctggcgcgacatcgtcggcctcaccgaacctgcgaccctggccgaacaccggcacatggccgtgcagatgctcgaccgtctgatgcaacacctgccacgcctggcgctgatcaaccaggacaccggcaccgccctgcgcgatttgcgcgtggcgttgaacctgctcgacctgctggcctactcgccgcgcatcctcggcgtgccacgggtgttgctcaaccaagtcgtcgaaggcgttggcggttacttcaaggcgtgcctgaaggccggtgaacgcctgcccgcgcccagcggtctgctgatgaccctcgaccgcacgcgccgcgcgctcaacggccagggcctgcaagacgaagacgacacccggctgcacttgttgcacgcgttggccggtttgcgcctggcgttgctgccgggggtggagttcattggcggcactgagatggaagcgccgctgcctgatggagcgcctttatgatcggagatctggatatcagcggggtgttcctgcccacgctgctggtgctgatgggcattacgtatgtgttgttcctggtggtgcacgggttgttgacccgcctccacttctatcgcctggtctggcaccgggcattgttcaatgtggggctctacgcgctgttgctgggcgcggtggactcactcagtcgatacctgatgacatgaaaaaaccttttttgactatcggccgtgtagtcctcacgttgttgatcgtaacgtttgcggtcgtcgtggtgtggcgcatggtcatgtactacatgtttgccccctggacccgtgacggccacatccgtgccgacatcgtgcagatcgcgccggacgtgtccgggttgatccagcgcgtggacgtgcgcgacaaccagttggtgaccaagggccaggtgctgtttgccgtggaccaggaccgcttcaagctggcgctgcgccaagcccaggccgccgtggccgaccgccaggaaaccctggcccaggcccagcgcgagtacaagcgtaaccgtggcctgggcaacttggtgcccagcgagcaactggaagaaagccagtcccgcgtgacccgtgcccagtcggccctggccgaagcccaggtgacggtggattccgcgcaactgaacctcgaccgctcggtgatccgcagccctgtggatggctacgtcaacgaccgtgcgccgcgtacccaggagttcgtcaccgccgggcgcccggtgctgtcggtggtcgacagcaactcgttccacatcgacggctatttcgaagagaccaagctcgacggtatccacgtcggcatgggtgtggacatccgtgtgatcggcgacaacgcccgcctgcatggccatgtgcaaagcatcgtcgccggtatcgaagaccgcgaccgcagcagcggctccaacctgttgcccaacgtcaacccggcgttcagttgggtgcgcctggcccagcggattccggtgcgtatcgcgtttgacgatgtgccggcggacttccgcatgatcgccgggcgtaccgccaccgtctcgatcatcggcgacaaggtcaaagacggagacaagccatgaagcagctgttggccgccgccgcgctggggttgctgctgtcggcctgccaagcggtggggccggattacacgctgccggaaaagtccgccatcaaccggggcgatctgcaagggcagatcgccggcgagggtagcaatgtcgtctcggccccggtgccggccgactggtggaagctgtacaacgacccgcgcctggatgagctggtgcgccaggccatggcctccaacaccgacttgcgggtggccgccgccaacctgcaacgcgcgcgtttccagacccaggaagctgagtcggcgggcggctggagcgcgggcgccaaggccgaggcccagcgtctgcaggaatccggcgaggcgtttttgctgacggaaaaagtcccggtagccaacatcggcagcgtgggcatcaccacctcgtaccagttcgatttgttcggcgccttgcagcgcggtatcgaaagcgcccaggccaacgcggatgcggctcaggctgccgccgacatcgcccgcatcaccctggtggcggatgtggtgcgctcatacacccaggtgtgcgcggccaacgaagaactggccatcgccaacgagtccctcgacctgcaagcccagagtactcagctgacgcagcgcctgcgtgatgccggacgtggcgatgaaacccaggtcacccgctcgcagacccaatacaaatccctgcgcgccgacatgccgcgctacgaagcggcgcgccaggccggtttgttccgcctgtcgatgctgctggccaagccggtggaccaattgccggccggcaccggcacctgcgccgagctgccgcatatcgcgcaattgctgccggtgggcgatggcgcggcgctgctcaaacgccgtcccgatgtgcgccaggccgagcgccaactggccgccgccaccgcgcgtatcggtgtggccaccgctgcgctgtacccggacatcagcatcggcgccaccgttggcaccgtcggcatactggatgacttgggcacggcgcccaccaaccgctggggctttggcccgatgatcagctggacggtgccgaccaacggcgcccgtgcgcgtatccacgaagccgaagccgcgacccagggcgccctggcgcacttcgacggcgtggtgctcaatgccatccgcgaaacccagaccggccttgcgcaatacaccgcgcaactgcaacgccgtgatgccctgaatgaggccggcgagtcggcgaaggaagcggcggggcagacccatcgcttcttccaggccggtcgcgcatcgttcctggccgacctgcaagccacccgcacctataccgatgtgcgcgcacagctggcagcggccaacacccaggttgccatgagccagatcgatctgttcctggccttgggcggcggttgggaaagcggacgaacgcaagcgtcacagcccggcaaaccctgagctaaaagctatgcttggtcaggtggggcgccgtgacgctccacctgacactgctcgcgtttgctcatggggattccaataatgaaaaacccttatgctcccgctttctggtgcgtgctcttcgcactggtgctgttatcggctgcttatttctacggcgtcatgctggctcaccaactcgacaaggccatggtgtttctcgacagcgcctgcctggtgatcggcaccctgtccatcggtgtggtggcctgggcctcttaccaaaatcaacgggtgaagcgaaagctcctcgaacagggcaagacccgtgtggcgatctgggacaccaaggtcgcgctgcgccgggtcgagaccgtgttcgaccgctatttctggggcagctattggcagccggggcgtaccttccaggaagtcatgggcgacctcaccggcactcccctggaaaagagcctcgaagtcctgaaaaaacagtgcgtggcgctcgaccagcaagtggccgacggtcggcattggctgaataacgcgcgggagctgtccgacgtggccacgcaaatggcccgcgagcgctaccagctggacttctgcgaccccaaggccgatacccccggcaacgccgtgatacaccgcgagtttgaggtactggtgtacacctggacggcgcggttgaagagtttcgaccaccagttggatgaaattgagttggagtactcctgaactactgctgaactgatccctctgaaaagctgggccgttcgcggcccccagtgctaatcttcccccgttttcggcgggcttgagccaaccccctcggggttcaaggaagacagcccacttctcacaggatttgatcaggtcacttcatgaataagccagcagtcgttcttttgggttttgttgtcgccgtgggcgtcgtcagcgcaggcggtgcctggtacaccggcaagcagttggagccggtgctgcaaacggccgtgcaggacgccaacaaggaactgcaacgctccatggcgggcgtcgacggcagcgccacccttgagctggtgtccctggaccgtggcctgttcagcagcaccgcacactatcgcctcaagggccagggctcggtcttcggcgaacagaacccgaaccctgagctgctgattgtcgaccatatcgaacacggcccgcttccattctcgcgcctggtgtcgctgaaatggctgccggtcatggccaccagtcactatgcactggaaaagaacgccaccaccgagaagtggttcgccgccgccaaagatgtgtcgccgctcaaaggcgtggccaatatcggctacagccgttcggtgaacggtaatctcgaactgctgcccctggagttcaaggatccgaccggctcgttgaacttctctggcctcaatctggatttcgacagcactgccgaaggcaagaaggtcaaggttgatggctacatgaacagcctcaagctggccgttgtcgacgccaacggcgcgccattcgacgctgaaatcgccggcctgaccgtagccagcaacctggagaaatccaccttcggcttctacaccgggcagaacaccatcgagctgagtgacaccaaagtcacgttcggcccgcagaaagccgtgctgaccctcaagggcttcgagcagaaagactccagcgaagtcaaagacaacaacatggccggccgcgtcgattacaagatcgacgagatcggctatcagggcaaaccggtcggctctgccgccatggccctgagcctgaagaacatcgatgtgccatcgggcctggtgttgaccaagttgtaccaggacaagatgcagccggtgcaagccgccgccgctgccggtcaaccagtgccggagctgcaattgaccgaagccgagcaggccctggccgaagccaacgtcaaccagttgctggctgccaagccccacctggcgctggaaaacctgtcgctgaaaaccacccacggtgagagcaaattcaacctggtgctggacctggccaagccgacttccatggagctgccgccggttgagctgggcaagcaaatggtttcgctgctggatgccaacctgaccttgtccaagccgatgatcgccgacgttgccgccctgcaagcgcaggttggcggtgtgaccgaccctaaagccatcgagcagcaatcccagatggccagcgagatggtcagcggcatggccgtgggtacacagttggcaaccctggtgggcagcgacgtagtgtccaagctgcactacgccaacaatgaagtgaccttcaacggccagaagatgaccgtcgagcagttcatcagcttcgtcatgtccaaagtcggtgcggttggcggcgcgcagtaaaaatttcgccatcgccctgaaataaaaatgggggagcggggatgcccgcgataaaggtcaaaccgtcgacactcatgtcgactggcaaccctctatcgcagctaaccctgctcccccattcgtatttcagatttgcagtgcaattctgaacaattgttatgacttgtccttttccatccgcgcgtcggggatagttcctacaggaaagctaggtcgggtcacgagacgccgacaccctgatgcaaattgctcaggaccacctatcgttacagctttccgtgtgtaaggaagctcacgatatgctgcgaacactcccactcagtgcctcaggccgtttgcggctgctcatcggggtaaccttgtgcagccagttgctgatgcccactttcgccttggccgacccggcctacgacgccctgatcatccaggcgcgcaacggtaacttcacccccgccctgacccaattgcgccaattgccagccgagcgccagacgccaggccagatcagcgaccacctggtgatcgctggttgggccggccaggatgccgaagtgctgaaggtgtacgaggcgcagggccagaatcgcaacctgaccgcccaggcgctggccacggttgcgcgcacgtatcgcaatcagaagcagtgggcgcaggccgaagcggtctatcgcaaggcgctgttgcgtgagccgaataatatcgatctgcaactgggcctggccctcaccgaggctgacggtggcaaggccagcgaagcggtgcagcgcacccgcgcactggtggccgccaagcccgacgatcccaaccgccgcatggcgctgggctacgccctgacccgtgcaggcttgcagtacgacgccttgtttgaattcgaccaggcctttatccgtgctggcgacaaaccggaggtcgcccgcgaatacgtggtcgccctgcaaaaggcccgcctgccgcagccggcgttgcgcctgtcggcccagcgtccggggctggtcgatccggtgacccagcgtcgcctcgaaggtgacctggccgcagagcgcgtgcgcatcgccgagttcgccacccgtaccgaaaaagaacgctatgtcatcgccgaccgtgcgctccaggactacgacaagctcctcgcccgctggaccccggacgccaccgcccatgacgacgtggtgatctggcgcatcgaccgcctgggcgcgctcaaggcacgggcgcgtaccgctgaggtgatccgcgagtacgagaccctccaggctgaaggtgtgcggttgcccacctacgccaagcgttgggtggccgcgtcctacctcgaccagcgtctgccggaaaaggctgcaccgttgtaccgcgaggcgctggacgcacccgatgcggacgtgggcgaccgtgttgaagacaccaccgcgctgttctacgccttgctcgaaaacgaccaggtggacgaggcgcgggcggtcgccaagcatttggccgacacccagaaaccccgggttgaactcaaggggctgccgattggcaacccgaacgatgagtggatggacgcccaacaattgtccgcgcaggccggcacctacggcgccgacctgccctccagcgaaaaagccttggacgacctggtgagcaaggccccaggcagcataggcctgcgcctggcgcaagcggaaatgtaccgcgcccgtgactggcctcgacgcgccgaacgctcgctcaaggaaacagaggcccaggccccacgcgacattggcctggaagtgagtcaggcctacaccgccctggacctgcaggaatggcgtcaactcgacatcctcaccgacgacgtagtcggccgtaaccccgacaaccgccaggtgcagcgcctgcaacgcctgcgcgaggtgcatgacatggccgagctgcgggtcgaggcctacaccggtaaaagcttcggtggtggcagcaacggcgatgccggtgctgtctcgggtagccgtgactggggcattgaaagccggctctacacgccgcccatcgatgaagactggcgcctgttcgccggcgccggctatgcccgcgccacgttcgaagagggcaccgggcagcatcgttggcaggtggtcggtgtcgagcggcggacccgcgacatgaccattgaagccgaggtctccaaccattcctacggcgatggctcaaaacaaggcgccgccgtttcgattgcccgcgacatcaatgacaactggcaatacggcggcagcctgggctacctgctgtccaccaccccattgcgggcgctgaatgacggaattacggccaacggcggcagcggtttcatccgctggcgcgccaacgaaagtcgcgagtggaaactgaccctcagcccgtcccatttcagcgacggcaacgaccgcttcgaagccttgctcagtggccgcgaaggcctctacagctcgccgaaagtgcaagtggacctgggcctggaagtcggcgccagccgcaacagcaaggaagacacgatctacttcaacccgaagtcggacttcaccgtgttgccggtcctcaacatcaaccatgtgctctatcaccgctacgagacccagtggagtcagcagttccaggtcggtgcgggtacctacagccagcgggactattccaccggtggcatcggtctggtgggctacggccaacgctttcgctggaacgatgtcctggaagccggcgccaatctgagcctggtcagccgaccatacgacggtgatcgcgaacgcgatctgcgtctgctcgtcgacctcacttatcgtttctagaagagcctgaccatgaccgtcttcagccgttgcctgttgatcctgggtgtaatgctggccagtgcctgcgcccagcaacccgcgcctttcactccacccgccgagcggccgaccccggccaacgaagcgccgtggccgaaaaaccatttcctgggcatcgcctaccacgacatcgaggaccgcgaccccgatcaggcggtggtggcggtgcgtaccgagcgtttgatcgagcaactggcgtggctgcgcgagaacggctaccaggcggtcagcgtcgaccagatcctggcggcgcgcaacggtgggccggcgttgccgcccaaagccatcatgctcagcttcgatgacggctactccagtttctacacccgtgtgatgccggtgctgcgcgcctatcgctggcctgcgctgctggcgccggtgggctactggattgacacgccgatgaaccagccggtggacttcgccggccaaccacggccacgtggcgagttcctcacctggcagcagatccgcgaagtgtcgcagtcgggcctggtggaaatcgccgcgcacaccgacaacaaccacaaaggcatcctggccaacccccagggcaatctggaaccggcggcgacttcgctgcgctttgacccggcgacgggccgctatgaaagccaggcgcagttcgatgcgcgcatgcgtgccgacgtcgtagcgatctcgaacaagatccagaacgtcaccggcaaaaaaccgcgcgtgtgggtatggccgtacggtgctgccaagggcacctcgctggcgatcattggcgagcagggctaccagatggccctgaccctggaagatggtctcgacagctctgccgacttgatgaacagcccgcgcttcctggtggcttccgacccggatggcgaacacttcgccaacagcatcgtcgcggcgcaaaccaaggcaccgatgcgcgtgttgcatgtggacctggataacgtctacgacccggacccggcccagcaagcgcgcaacctcgaccagttggtgcagcgcgtggtggacatgggcgcaggcactgtgttcctgcaagccttcgccgaccccaagggtgacggcctggtgcatgagctgtacttccccaaccgccacctgccggtgcgtgccgacctgttcaaccgcgtctcctggcaactgcacacccgggcgcatgctgcggtgtacgcgtggatgccggtgctcagctttgccctcgaccccaagctgccacgcgtgacgcgttgggacccgcaaaccggccaggtcggcctcgatccggaccaatacaaacgcctgtcgccgtttgatccgcaggtgcgcaagatcatcggtgagatctacgaagacctggcgcgcaacaacgccatcgacggcgtgctgtaccacgacgatgcggtgctcaatgatttcgaagacgccagccctgccgcgctcaaggcctacgttgccgccggcctgccgggcacgatccaggccttgcgtgccgaccctgcggtgatgcaacgctggacgcgcttcaagagccgctacctgatcgacttcaccaaggagctgaccgccaaggtccgcgccattggtgggccgcagttgctgacggcgcgcaatatcttcgccgagccgatgctcaacccaggcagcgaaacctggttcgcgcagaacctcgatgacttcctccagacctacgactggaccgcgcccatggccatgccgctgatggaaggccaggaatacaagacctccaacgcctggctggagaagctggtggcgacggtcaaggcacgccctggcgcgctggagcgcaccgtattcgaactgcaagccaaagactggcgcaccaaggccgcaccggacatcgacagccaacagatggctgaatggatgggtgtgctcaagcgccagggtgtcaccagttttggctactacccggacaacttcctggaaaactccccggacctgaagactgtgcgtccggccctttccaaccaatggaacccttgaccatgttcgatagaatcctggctttattcgtgctggcattggtattgggtgtgcccctgggcctgatcttcctggtcaccgggcagttcctgatggactttgtgtttttctacccgctgttcatgtcggcgttgtggattgccggcggcctgtacttctggctgcactgggagcgccactggccctgggaagaggacaccccggcgccaaccctggccggcaacccgctgatctcgatcatcatcccttgctacaacgaaggcgataacgccgccgataccattcatgcggcgctgggtcagctgtacccgaacatcgaagtgatcgcggtgaatgacggctccaaggacaacaccgccgccgtacttgatgccctggcattggagaacccgcgcctgcgcgtgctgcatctggcgcagaaccagggcaaggccgtggccctgcgcatgggcgccgtggcggcgcgcagcgaatacctggtgtgcatcgatggcgacgcgttgctcgacaaaaacgccgcggcctatatggtcgcgccgatgctcgacaacccgcgtctgggcgccgtcaccggcaacccacgcatccgcacgcgctcgacgctgatcggtcgagtgcaagtcggcgagttctcctcgatcatcggcttgatcaagcgtacgcagcgggtgttcggccggatcttcacggtgtcgggtgtggtggtagcgttccgtaaaaaggcgctggaccgcatcgactactggagcaccgacatgatcaccgaggacatcgatgtcagttggaagctgcagctcgatcactggagcatcttctacgagcctcgcgcgctgtgctggatcctgatgcccgaaaccgtcggcggcctgtggaagcagcgcctgcgttgggcccagggcggtgccgaagtgctgttcaagaacatccgtggcatctggcaatggcgccatcgctacctgtggccgctgttgttcgagtactgcctctccactggttgggcgtttaccttcctgttgtcggtgatcttctacgtgctcggcaaattcatggtgctgccaccggccattaccgtggactcgctggtcccgccggcgtttaccgggctggtgctggcgatggtgtgcctggtgcagttcgcggtgagcatcatgatcgaccgccgctacgagaaagacctgtggaaaaccctgttctggaccgtgtggtacccgatggtgttctggctggtgagcctgttcaccaccctggtcagtttccccaaggtgctgttcaaccaacatcagaagcgtgcgcgctgggtcagccctgatcgcggcatcaaacctaccgaagaggaggcgtgatcatgaaactggtcagaacccgccagcgtttggtgatgtggattattgatgtggtgttgaccctgatggcctgggccgggttgatctggctgctggcgcgcgggatcacctcgatgctggagactcacggcgggccgcgcattgaggcgccgatctttgccgcgctcaacaccttgcaggtgtacctgtggattgcattgttcaacgccgtgatcctggtcacttgggcgcgctaccagcaacgcaaggggcgcaagtttgcccagcgccgtgccgagggcaacgccctcagtgacaagcgcctgagcgagagcttcagcctcggtgaaggggacctggagcagttgcgccgacctggggtgttggtgatccagaatgacgacgagggcggtgtggcgggtgtgaagtcccatgtctcccgcgatgtggaaaaaccggggctgaccctggtgcccggcaaggaccagaacaaagacgccagctgagccagtgcgctgtaaggtcgttcccatgcaacgtgggaacgacctcggttaatcccgacaagtgggatccaattcacaaaacgcccgcgaacttttctgctttttccggtactaacttatctcggcaagaacttgatggccaattaatggcaatttataagttctccgatgaatcgcgatcaatagtgctgccgctggtcgaaataatacttccgatgacaagccgcttatctatctgattaaatttagttgttattaatcaacagcttgcgtgaataactagtacgaatgtgcaactagctcgttgttttgagtgggtgcaagttcgatgttagtttgccggcccttgattttcgacggatcgaacatgtctttgttattgccacggactcggtactttctgtgcactttcctgcttgcttatttgagcctgaacagcgcctcggccgcccctacgccaggggatcaggacctgatccgcgaccgccagaaccgtcttctggaagagcagcgtcggcgcctggaagaactccaggacctgcctggcaaagaagccaagccccaggctccggccacgccggtcgacacccgctgcttcccgatcaaagacatcgaactcaagggcgccgacagcctgtccggcgcggaccgcacgcgtctgctcaagccctatatcggccaatgcctgggcgtggcgcagctcaatgagctgctcaaggtgatcaccgactactacatcgccaaaggccgcgtcaccagccgtgcctacctgccgcaacaggacctttccagcggccatctgcaagtgctggtggtcgaaggcaagctcgaaggcttgaaaggcgcccaaggcagtaccgtcaccgaccgcgagttggccatggcctttcctggcaaggtcggcgaggcgctgaacctgcgggaggtcgagcaactggtcgaccagctcagccgcttgccgtctaggcaggcgcagatggaactgacccccggcagccagatcggcggcagcgaagtgctggtcaagaacaccccgcaaaagccctggcgcgccagcctgtcgcgcaacaacgacgggcagaaaagtaccggcgaacagcaatggggcgcaggcctggaatgggacagtcccctgggcctggccgatcaactgatactgcgcggtggccacgacgccatcagcgaccaccagaaaacctcgaaaaacagcatgctgtattacaacgtgccgtggggctggtggaacttcagttacacctacagcgagagcgactaccgcacgccgggcgaccttgacggctacaagtacaagcagacaggcgacagccagaaccaccagctgcgtgccgagcgcgtggtgcatcgcgatgacgtgagcaagacctcggtcaatgtcggcctgacccatctgcgcaccaacaactacttcaacgacgagcgcctggacgtcagcagcaaccgcctcagcgagttccaggtgggcatcaaccatggacgccgcatcggcagcgccttcgtcaacctggatgtcggcatgcaaaacggtaccggcgcctttgacgcccagaaggatgaccaggaacgtatccgcggcaacctcaccccaaccccgcgctaccgcaaatacaccgccacagtgagctacctgcaacctttcacgctgtggggcgaatcgttgagtttttccagcctggccaccgggcagcgcagtgaagacgtgttgtacccggcgcaacgcatgagcctcggcggctcgtattcggtgcgcgggttcaaggaccagcaactgaccggcgacagcggcggctactggcgcaacgaagtgcgctgggcccgcccggtgaccctcgactggatgcgcccggcctttgtcgaatacggcgccagcgtcggttacgaccaaggcgtgattcgccacgatcgctacaacgatgaccagcacggccgggtgtcgagtaactccctcgagctgttcgctcgcggcaaaaacgtcagcaccagcgtgacctttgcccactccctggagcgacctggcgtgatgaccgagcgcgaagcgccgatctatttccgcctggatttctacctgtaattcaacgcccgctgccttgagattttgaatatggacgttcgccctgttactgcccttaaaaccctgagccaacgcggcctggccttgatcctggccaacgcgctgttctggcagccattgctggcgagcgccgaaggcatcgtggtcagtggccccggtaccacggtcggccaggcgggcaacggcgtgccggtggtgaacatcgccacccctaatggcagcggcctgtcccacaaccagttcaaggactacaacgtcggccccaacggcgtgatcctcaacaacgccaacagcattgtgcaaagcacgcaactgggcgggatcattgtcggcaacccgaacctcaagggcggtgcggcgaatgtcatcctcaacgaagtcaaaggcggcagccccagccaattgcgcggctacaccgaagtggcgggccagtcggccaaggtgatcgtcgccaacccttacggcatcagctgcaacggttgcggcttcatcaacacccccaacgtcaccctgaccaccggtaaaccggtgatcgatcaggccgggcaactgaaaagctaccaggtcgacggcggcgccgtgaccatcgacggcaaaggcctgaacgcgagcaatgtcgaccgtttcgagatcatcacccgttcggccaagatcaatgcgcagatcaacgcgaaacaactcacggtgatcgccgggcgcaatgacgtcgatgcccaaagcctggcaaccaccgcccgtgccgatgacggcagtgccaagccggagctggcgattgactcgtcggcgctcggtggtatgtacgccggcgcgatcaaactggtgggcaccgaagccggtgtgggcgtgaagctcgacggtacgctggccgccagtggcggtgacattcaactcgatgccaacggccacctgagcatggcccaggctgccgccagcggcgcagtggacatcaaggctgccagcctggagaccaagggtgcggtctacgccggcaccaccctcaaggcacagaccaagggcaccctgaaaaacagcaagaccctcgccgcccgcgacagcatcaccctggccagcaacggccagttgaccaacagcggcatcatcgaagccggggtcaaccccgacaacacgcgcaatgccggtggcgatgtcagcctcgacagccagcgcatcaccaacaccggcaccgtgatcgccaatcgcagcctcaccgccacggcgcaaagcctggataaccagggtgcgaccttgagcgccaagcaggcgctgaacatcaccgccgccagtgtcgacaaccgcaacaaagggcgcctgctcagcgacggcacgcagacgctcaacgtcagcggcctgctggacaacagccagggcggcatcatcgacagcagcggtgcgttcaccctcaacggcaatagcctggataacagcgccggtagcctgaccggcggtggggtgatcaccctggatctgatcggcgacctgatcaaccgtaacggcaagctggccagcgccgggccgttgctgatccagcgcgccgcgcacatcgataaccagggtggcaagctcgccagccagggcttgctgaccgtgttcgccaacagtgtcgacaaccagaacaacggcaccctggccgccaacgatggcctggtcctgaccaccagcggcctgttgcaaaacagcggcaacggcctgatccacagtgaaaacgctggcgtgaccatcactgccggcaccctcgacaacaacggtggccgcatcgccgccaaagccggtgatgcgcagatcgacgccacggatttcaacaacggcagcggcgcactgttcgcccgggatcgcgtgcacctgaccggtatgaatgtggataacggcggcgagatcgccggtaaccgcatcgacgtcagcctcaatggcgcactgaccaaccgtggcctgatcgaaagcgccacggccctcgatgtcgagaccgccagcctgaacaacagcgggcaaatgcgcgccttgggcaccagcggcaaaacccgctacgccatcggcggcctgctcaacaacagcggtagcctggagaccgccaacgaccaattgagcctcgccgccacccgcttccagaacaccggcggcaaggtgttgcacgtgggcaccggcgtgctcgacctcagtggcatcagcctcgatgacgtgggtggcagcctggtcaccaacggtgacctgaccttcgataaagcaagctggaccaacagcaccgcgatccaggccgggcgcctgaccgtcaacgtggataacctgcaacagaccgccaccggcaagctgctcggcacccgtgccctggtcggcagcggccaggactggaccgtgggcggcagcgtcgccagccagggcagcctggatctttcggtgggcaacctgctcaacgaccacggtttgatcttcagcggcggcgacctgaacctcaaggtcgaccgcctgaaaaacctcggcgccacgatctacgccatgggcaacctgcgcgttgatcgcgacggccagggcggcttggccaccagcatcatcaacagctcgggcaccctcgaaagcgagcgtaacctggtcctggctgccagcacgatccagaacatccggactgtgctcaacaccgagtccggcatctacagcgcctccatcacgcccaccgcctgcatctttcgcgtgaccggtggcgactgcgacggccccaagcagaaccgcccgttcctgattacccagcgtgatcacttcatcgtcagccaggccactgcagcgtccagcatcacctcgggcggcaacatgctgctcaccggcggcgagctgctcaacagcagcagtagcattgccgccggtggcaatctcacggccatcgtcaaccagctcaccaacgtcggtgtcgtgacccacgacacccagtacgatcgcatcttcacttccgagcgcgagcgtaagccggggggctggtaccgcgaggcagcggccttcacccagcgttattcggcaggccaggacatgggcggcgtcgaagcgggcctggcctcgttcatcggtaagatggagagcgagcagatcgccctgcgcaagaccacccagttaagcgcgccagaccaaagttacgccgctgtgatccaagccggcggcagcgtggatgtgaaggcccaggccggcatcgacaacagcgtcgtgcgtggtggctacacctacgtcggcagcggtgccaacacccatgcgccgggctactcgaccctagtcagcctcaacccgcaactgccgccggacgtggcccagcaacaggtcaacccactgggcctgcccggcttcgacctgcccactggcgagaacggcctgttccacctcagcgacagcgatggcgccaaaggcctgcccaccagccagttcgcggccaacccgcataagtacctgatcgaaaccaacccgctgctcaccgacatgcgccagttcatgagctcggactacatgctgagcaagctcggctatgaccccgacaccgcgcaaaaacgcctcggcgatggcttctacgaacagcgcctgatccagcaagccgtgctcgctcgcaccggccagcgtttcatcgatggccagaccagcgacgccgacctgttcaagcacctgatggacaacgccatcagcagcaaaagcgcgctgaatttgtccgtaggcgtgagcctcaccgccgaacaagtcgccgccctgacccacgatatcgtgtggctggaaaacgccaccgtcgccggccaacaagtgctggtgccggtgctgtacctcgcccaggcaagcaaccgcctggcgcctaacggcgcattgatttccggcactgacgtcaacctgatcaccggccgtaacctcaacaacgccggcaccttgcgtgccaccggcagcctgttggcgaacgctggcggcaacctcaccaacagtgggttgatggaagccggtggccgcctcgacctgctcagcggtaacaacctgaccaaccgcgcgggcggtgtgatcagcgcgggcaacgtcaacctcgccgccggcgccgacctgctcaacgaacgcagcgtcaccacccacgcaagcgccagcagctaccgcaccgaacgccgcgacttcgtcgacagcgccgcacgcatcgaatcggccaacgatttgaccctgcaagccgggggcaatttcaacaacgtcggcggcgtgctcaagagcggtgccgacaccacggtcaaggccgtgggcgacatcaacatcaccgcctcgaaaaccctcgacagcggcgccatcggcaaccgttccagcttcaccaccatcgcccagcaaggctccgtggtcgacgctggccgcgacctgcatgtgattggcgggcgcgatatcagcgccgtggccagccaggtcgaagccaagcgcgacgccaacctgattgccacccgcgacttcaacgctgttgcggcggccaacgagcagcactccacgggcaacacaaaaaaggtcaagagcatcgaagaccacgtgcagcaagtgtccagcgtgatcaaggccggcggcgacgccaccctgagcgccgggcagaacctgcaactggtcgccagccaggtgaatgccggcaacgaggcgtacctggtgtccggtaagaaccttgagctcaaagccgcgcaagaccaggactacagcttctacagcaagaccaagaaaacctcccagggcaaaaaattccgcctggatgaaaccgatgccgtgaacaacgtcggcagcttggtcagcgctggcaaaaacagcaccgtcgtcgcgggtgcagacctgctgttggccggcagtgctgtcaccgcagaaaaaggcgcggcacgattagtcgccgcgaacgatgtgcaggttctggccgtcagcgattctgaaaagtcccgccacgaacgcaaggaaagcaaaagcagttggggtggcttcaagtccagcaaggtccaggacaaagtggatgaagccagtaccaccgcagtgggcagcatggtgtctggcgacacggtaagcgttgccagcggacgggacgtgaaagtcaccggttcctcccttgttagcacgggtgacctcgccgtgcaggccggccgagacctgacaatcgacgcggcgcagaacaccttcgcccgcaccgacatgcacaaggaaaaaaatcgcaacctcaccggcgtgctgaccggtaacaagctcggtctggatgacatgaccggcaaccagaagctgtacatcaatagctcgaaacacaacggcactgcaaacgagacaactttgctggggagtacggttgggtccagcgccggcaatgtaaatctggtcgccggacgtgaactgaaggtagtcgccagtgatttggtgagtacgaaggacatgtcgttaagcggctcgaatgtcaccattgcagccggcacagaaacggctaaccaaactagtaaggacagctccaggagcttggcagtaggccgggttattggtggcgtggcggtggatacctataagagcattcgcaatgacgttcgggctgcccaacaggctgacgacagtcgtctgaaggccgtcaaaggtgcccaggcgttactgtcgacctacgatgcgctgggtggcagtaatgacgcggccaatgagtcagatggcaagcctgccaacagcgctggttcggtgttcaagattgggaccgaactcgcgtctacgcacaaaaaaagcaccagcgaatacaacgccgaaacggtgaagcaatcgaccgtgaacagtggcggcagcttggcaatcgtcgcaagcgggaatgcgcagggcaccgcaggcgacttgcatatcatcggcagcagcatcaaggctaaagacacactgttgcaggccaagaacaacgcgattctggaaagcgcccaggatcggagaaactgggataaccagaataaaaataacaagaccagtgtcggcgtcagcctcagcttcggtgagcagagcggctttgtgctcgacttgggtgctcagatggccaagggcatgggtgccgggcatgaaatcacacaagtcaatagcacggtggataccggactgctcgttcttaaaactggtcaggacgctaccctggcaggcgcgcaggtacatgcagacgcgataaaggcgcaggttggcggcaatctgaatattgcctcgcgtcaggacgaagccagccagaagaacaagcaaaccagtggcggcgctggcgtgagtatttgcgtgccgcccttctgtctggggtccatggtttcgggcagtgccaatattgctggcagtaaaatgaacagcgattacaaggctgtggcccaacagtccggtctgtatgcgggcaaaggtggatacgacatcaatgtcggcaagaacaccacccttcaaggtgcggtgatcgccagcgaagccagcaacgacaagaactacttgagtactgaccgactattggtcagcgacatcaaaaacaaaagcgatatcaaaagccagtccgcgagcctgagctattccggcgcaaccgccggtttcgaagacgctcgctcaggggttggtggcgcgattccgctgttgctcaaggagtctgatagcagtaagacccgcagcgcaatcagccctggaacgatcgacgtaagaagcgcggacggggctaatgatctgatcggcctgaaccgtgataccgcgaatgccaacaaactgctcgaccggcctgatgagaaggccatgcaagagcgtattgacctgatccaaagttcggcgcaactgtcgagcagcgtaatcaacaaggttgccgaggccaaggcgagtaaagccgcagcattgagcaagcaggcagatgaacaggcagaggcgggttctcctgatgctgagcggacggcgctggcggcgaatgcggcgtatctggatgccaagagttggcaggtgggtggtgacaaacgtctgatggcggatatcacttccggtttgattgcggccggattgggcggagcgacgggaagtaccgctgccggtattgttgcgaacacatcgtccagtgacatcttcaacagaatcggcacttttgccgatgctcagaaaaatcgtaaagatattgatgacgcgacaagggctgcgtgggctgaaggcggcgccgcgcgcgttttactgcacgcactgaccggtgcggcgcttggcctgtccagcgggaatgtacaaagtgccgcactcggcgtcggcgcctccgctgcgcttatgccgtccattggtgaggctctgaaaggaagcgagctgagtgaggcagagcaaggtgcgctttcgaccttgattgctacgagtctgggggcttcgattgggtcagccaacggagtcagtggctcggttgtagccggtagcggagcagcggcagttgaccttaacaaccgccagctacacgccatcgaaatcaatcgaatcaaggcgctcgcaggaaagttcgcggaagaaaaagacatatccctggaggctgctgaagccaggcttctcgcccaggcgcagcagaatgtcgataaggattttgcgactgaccattcgatggttgacctcagcgcaatgtcttttctacgttcccaggcagctacgtttgtagacgaaagcgggcgcacgatgttgatgtttgcccccggcggtaaagacgcctacgaagatgcggggatgtatggtcatacctggaatcagtttacgactgagcaacaggcgatgctgggtgcagcctcaaacaagaaccagtcccaaaaagacagcgaaatatgggatgcaacacgcagcactgcccttggaggcctaggtaaaggcgttgtgaactatcctagcgatgccttgaatgggatcatcgacttcgggaagcagtttctacacctggatgaagtgggtaaggaagttgttccggtacctttggattacgacaacccagtcgagcgagaggttgccagcggtacgcagcgtctgatagataacgcgatgatggtgttgggggcagcatggtcgtcggttagcgcaaaagtgcctgtaactgatgcactgtctggtgaaacaaaggtagtaggtggcggtacagcagcggctaacgatgcgagtgttacaggtgcaaaaggcaaaactgcatcaaatgaaccaaactctcagcctgtagcagaaaatggcggtgcgtcaccaaaacaaactgaaacctatttcagggttgaatcaggtggttcaggattccagactagccaaaatcgcatttctgtgaaatctgatgggacggtagcgattgattctggatgcagtggtcagttatgtgtcagtacaaatggccccagccatgctgcgtattatctttctaataaaaggcctgacggtaacgtggttgtttttgaggttgatcaatcgttgcaccaaaaaatcatgtccgaagctattgatcaacgacctttgcccggtcagacaaggaaccctaacgcccccaaaatcgttgatccgaatcaagggaagccaagtgtttcactagaactcccaaaagtatgggattccttgcttgagaaacactcatcaaatgcacgagtattgacgcaggaggagttctttcatgagtttggacgctaagtttgacgtattagaaagtgagttgtttgaagggcaaaaatcaattgctctgtttgttttgaaagagcagcattattatgttgtggatgataaatctaattactgtatcgatgtccggccggattatttttcgtatgttgaagcaggtcgactaaagcaggaagattatgaaaaagctcttaagctctttcgcggtggaatctcagttttaagcgcagataattttcatcagtacatcgatagcaccgaagctgaagtgataagttctacgatgatgaaagatttcttttccaagggcttaacgttgaagagtgctaagagtttttataaggacgtagagcggttcttatcttatggaggagaaatggattcgcgaaaatggaattttttgcgtatgaaattaccgagcttttacataaatttcgaccgagggatttaccgacataccgactatggtcggttgcatgaggaattggcgttgccaaaaacacagtgggatgctcgttgtagtagcgattttggattgctcatccctgacgatgatcaatattggatcgtagatagaatgaatttctggaagctttatggtggttgaattactcgaaagcttatatgtggtctcggttcgaatttttctattttctttaagatttagttggtacaaaagagactgcatctggcttggtttctggagaaacaggtgttgtaagtaacggaaaagttgctgttaacgacgcgaggttcgatggtgcaaaagggccgaggcagcttatctctgatgcaatcaaccctcccaaggtcagcccggttgagaaaataggggtcagaccccgattagtgcaccaatgtatattggtggtctgacccctatttcctgctaatttatgagaccaactaatatggattatgcgtttctctttgcaacgcttcagagtcagttggtgcttgcgttcgccgaactgcaccccaatgcaaaagattctacctggctcctcgacttcccgaagaggggagacttgcttgttgatggtgatcaatggcaatttctgaggcatggtgcaggtattcgttttgaaagagtgtcgcgtaaaccccattgggtcgtggatgttcataaacgctttgatgagccgaaaataatcgacaattggcgagtgcttcattttcttgaatcgtgcggggtaaacgtgaatgaagaccaagtgtcatcgttattaaataagttgtgtttaaaaggtcatttgcttgatcaaggtaatgggcagtttctatttgtcgactaatcacgagcaaggagtgcttgatgagtttgaaaaacgacttgaatgatgtgcttcataatatttctgaagggcaaaaaggagaaaaggtgacagatttatttaataagggcaaaaaagtggacggatttatttgattttcgagtccttttttaattaaataaatctgtcaccttttcgcactattggtggcgcacgtactgatattcctggacttgaaacgcaagggggaataggggggaaaatagggggcagaccacgattagtgcaccaatatatattggtggtctgacccctatttccatattaatggtctgacccctattttccatggagccaaaaaaggagggttttaatcgtgagcgactcagcttcaattatatcggatgtggcaattgatgaagatgcgtttgctgattttattcactctataggcggggtcgttagtgccggaaaacgtaatcgtggagtattgaattgggacgacgccactttgtatatttcattactcaactccgaaaaattcatgaatttttatgattcgcaagatatgctcgattgggaagatttgttgggtgaccctcctaagacaatgatcgaaatgcaattgggtcattcggaaggctcgatggagatgtatttatggttggcgtacgagtttggcaagaaatggaattgtgttgtagatgacgttagtgcggtgacgcttaactactccgaagtctgtgacaggtacacaaggtcgactatgaaatagcagaaaatagggggcagaccttgagtgatgggggacagaccaccttggcaatgaaatttaggtattcaataaatcacccataaccgcttgagatgtgagcctaggagtcatcttgaagatccttttgctggcccttttttctgctctattactgagtggctgcggctctgcacgctatgaaaaacctatcccctacgatcaggccaccaccgcacgcatccgactttttgggaataacggtttgcctatcgccatcaaccccggacaagactgcgcgtcgagtaaagaacctctttttgcctacggttataccgttgcggataaggtcaattccaccttggggcaacacaccaagcgaagtatcggaatgcccgcttcctggaggagcgagcacctgagctatggcgagtcttatgccgagtttgtgatccctgcgggtgtgccgtctgtggttgtgatgaagatggttgccgccgaggcgtcttgtgtgcctgatccacgtgtatttgttcctgaggcgggtaaagattatgaggcgtacctacagaggcaagactggcagtgcggtggcgtgattcgactgctctctggtcaggagacgcctggtgctattgcacacgttccgtcgaatagttgcgggagaaaataaaggtaactggcgaagcgcaaagaaggggagagtctcatttaataattacttgccgctcaggagaaaatccgggccagaccacattttgtacaaacccggacacgggatcacagtgatggcacaatgcctcatgtaacgccatccactgccgacacactggcgatggccaaacgcatcaggaaaaggtgaaccggccgtcgtcggcgttttcgaaaccgccccaccgctacccacaaggaagaaatacatgatcaagttgttctgcaaagccgctgttgctctgtccctcgtcactctgtttggctgctcctcgacgccgtcggtggagaagatgcaggccgatgtggcgaactattcgttgcctaaggctgctgtcgccgataaaggtttggtgtatgtggtgcgcccgagcaacgtggggatgatggttcgcttcaacgtgttcctggatgacaaggaagccgactcggagatgggttacaaccgcggtaaccagtacatctattttttcgtgacaccgggcaagcacgtaatcagttccaaggctgaaaactgggcggacatgccgattgatgtcaaggcgggtcaggtggtttacctcaagcaggaagtcgacatgggcttcgccatcgcacgcaacagcctcaaagtgctgagcgacctcgaaggccgttacctggtcaaagatgcgtccctgggcaccgtggcaaaagaaagcaagtgagttaaaccgttgaagcctgccgggctccaggtccggcaggccgtcatttttcaccctgcgcaaacgttcaaggactgatgtgaaaaacctcctcttcatcctatttgccacccttatcctcggcggctgtgtcagccatccccttacgcccgaacaccgggcccagatcaagacggtcaaggtgctgccggtaaagtgggagtcgcaacagatggtctacatgggccgtgagcaagcctggggcgcagcattgggggccgggcttggcgcgggcgttggcatggccagcggtgcatccaggttgggcacggcggcgttgagcggcgccgggtttgcagggggtatgaaacttgggcagttggccgagatgccgacgccggtagcgatccttacggtgatggacgctgaaaaaatcgatttgggcgtgttgctcaaacagggctttatcgatgcgttgggtaagacctcaaccctcaaagtggtgggtgacgatgaacccgccgatgcgcagatccagctgaccgtggccgagtggggctttcgcctgacccaagggttcagcagtgtggtgtaccccaccctcaatgtgctggcgcagatgaatcgcggcgatgaaatggtctggcgcaccagcgaggcggtcacgccgttcaatggccagaacgtctacggctacacgccgctcacctatcgcaccgaccccgaggcgttgcgccgcgcgctcacggggattacgcagatctccagtgggtatttggtgaaagagctcaaataagccagcgcgtgcgttaatgctggcctgcccctgtttcccgattccacggacgcatgacatgaaaaaagcaattgttctactggcaatcaccggcctcgtcaccgggtgtcaagcttccaggccgccaagctcctttgagcagagtctggccaacgttcaatgcatgctgtccgagggcgagaaaagccccacagccgatcaggttcagttcattcgtcaagccagcgataacggcaacgtgcgctgtaagactgcgctcggtggtttgtacgaatccggtcgtggcggcgtgccacaagattttgccaaggccagatcgctttatgagtccgttgccgccgtggatggcgtcggttacgaaaggctggcgcgcatggccgaggagggccacgggcaagtgcgcaacgatgtggaggcgcgacggctttatcagttggcgctgaccaacagcgacagcgataaaagcaaactcgccttggcccgattgatggaagagggtcgaggtggcccgcaggatttgttcggggccatgatgtattacgtggaggccagccagcatgccggcgatgtcgcgtggaagggccttcagcgcattcgcgctcaacgaccggtgctgacgcctgaacaagcacagcgctacaacgaggtctgggctgacaccagtcgcaagagcctcaatcgtacggcactggacatcgagattgccttgaacaagcaaatcaaacgcggcagcgcgagcaagccggtgacgctgcaagtgcaaggccagtcgggttcgaatgtgccgaaaatcctattgatcgaaagctcgggcaacgccgaggtagaccaggccgtggtcaacgcattcggtcaataccgcattcctgccgagccgctattgcaggcaggccaggactcctggtcgtccgagcggtctctcaaggtcggtttgaattgaagggctggagccctgatgccatgggccgttcacattcaacgcagacacgaacaccttgaatctggagcaacaccgtatggatgcaagcaacacccctgaacgcccgaccgtcctggccagcatcggtcgtcgcctggctgcacgggtcatcgactgtgccagcgttcgcagcctcgcggatatttatgacaatggcagagggtaaggacgttatgaacgactcagtagcgactaaagaaacctgggacctcgccagcccgttcagacggttactcggctatttcatcgatatggccgtggtgttgttcctgctgtttttgaacagaagcctgggctctgtctatctggacgccgcagcaggctcggcattgctcaatggcctgcactacgcattgttgttcctggccttcgggtacggcttgttctgcgatgcgctacccaatggccagagcttgggtaagcgtgtatgccgcacggcggtggtggggtacccgtaccccatgaactgcacgctgttccagtcgttcctgcgcaatgcgccgaaattgctgttcagcgtattggatggtctttttgtgttgttcggcatgcgtcgtcgtttgggcgatatgttggccaagacggttgtgatcaatacgtaggcagaatgatggcctggagccagcattcttttgttttgcggacaaggccttagcgttgcttacctgccttgtcgggcaaaacgccagtaacacggcgccgctcgagctgtaaaacagcttgagaacgcctttcaactccgtagaatgccgcgattgtttaaagcacgatacttttcagggacgaattcagacatgcgcgtgtttgccgtacttatcgcggcctgcctactggcgggctgtgcctccaagccggattactacatctccccggcgccggtaacgattccgaagactgctacttactggctcgacaacttcgatgttgaggtggaggggcagaacgatcgcttcatgtcggacgataaagtccgcgaacaattgggcattgacctgattaaccgcctgcttaaagccaagcgatacgccaccagcaaggcttccgccgattacctgctcgatgtgaaagtcgtctacaaacgactcatccaggatacgcacggcgcgctcgtcagcacgatcatcgaagacaacaagtacttggtctcggttgatttcagctatgaggtcaaggtcaagaaaggcgataccgaagtcctgcattttgcgcagacgcgcgaacgcctcatgccgagtatggggccgggacaatggcaacactggaagaccgttggcggtattttgacccgtagcggcaactcaaatgtcgaggggttttataccggtaatttgagcagtttcatcgccaccgatctccgtaacattccatcccgttagtttcatccgctttaaccgatttatcacccaggagcaccctgtgaacacactgtccaaaatcctgctgtccggcctcaccgccgcagcgctgctgaccgtggccggttgcgccacggagagcaaccgtgcgatgccggtggagcaagtcgccagcgccaacgtcgcttattccggcgtgcgcgtgccgattgccgtgggcaagttcgacaaccgctccagctacatgcgcggcatcttctccgacggcgtcgaccgcctcggcggccaggccaagaccatcctgatcacccacctgcagcagaccaaccgcttcagcgtgctggaccgcgacaacatgggcgaaatctcccaggaagccgcgatcaaaggcaccgtgcagaagctcaagggcgctgactacgtggtgaccggcgacgtgaccgagtttggccgcaaggaaaccggcgaccgccagctgttcggcattctcggccgtggcaagacccaagtggcctacgccaaagtcgcgttgaatatcgtcaacatcagcacctccgaagtggtgtattccacccagggcgccggtgaatacgcgctgtccaaccgtgaagtggtcggcttcggcggcaccgccagctacgactccaccctcaatggcaaggtcctcgacctggccatgcgcgaagccatcaaccgcctcgtcgacggcatcaatgccggcgcctggaacccgcgcaactgatcagcagcacctcaaggagcagtacaaggatgagcaaggcagtcaagttggcgctgatgctgacagcagtggcgacggtcgccgggtgccaaaccgcgccccagccgttgtatcaatgggaaagttatcagccgcaggtttacgaatacttcaagggtgagcccaaggaagcgcagatcgaggcactggagcgtgatctgcagaagatcaacgccagcggccgcaaagccccgccgggttaccacgcccacctgggcatgctttacctgagcatgggcaaggatgaccagatggtgcaggagtttcgcaccgagaaggcgctgttccctgaatccgcctcgtacatggactttctgctgaaaaacgccaagaccggagtcgccactaaatgagcctgttgaaacttacgggcgccttgctggccctggccctgctcggcggttgcgcagcccccaagaccattgattacacggcgtacaagcaggcacgaccgaagtcgatcctagtactgccgccgcttaatgagtcgccggaagtgcaggcgtcctacagcctggtctcgcaagtgacctacccgttggcggaagccggctactacgtgctgccgatagctctggtggacgaaaccttccgccagaacggcctgaccacggccaacgatatccaggccctgccaccgaccaagctgcatgacatcttcggtgcggacgccgcgctgtacatcaccgtcaccgagtacggcaccaagtacatgctgatctccagtgacaccgccgtgacggcttcggccaaactggtggacctgcgtaccggcaccaccctgtggaccggctcggcgcgggcatccagcgaagagggcaacaacaacagcggcggcctcgtcggcatgctgatcacggcggcagtcaagcaggtgatcaacagctccaccgatgcggcgcacccgattgccggtatcaccagtgcgcgcctgctgtcaccggggcaacgtgcggggatcctgtacggtccgcgtaaccccaaatacggcacggactgagttcatgtgggaggaggcttgcccccgatagcggtagatcagtcagtacatgtttgactgacccaccccatcgggggcaagccccctcccacagttggactgttatttgaatcagggttaacccgaacatcccgcacctcgcgtctgaccttgtgaacggatcatttcattcacgaggttcagcccatgtcccgtcctctgctcttcctgcgtcctgctgcccagggctttgcggttaccgtactggtaacgctggccgggtgtgggctgtcctcttcgcctgagctggccaagccggccgaacccatcgccgagctgcaaagcgcgccaccccagggtgcgttggtcaaacgcatggcaatgcctgcaccgatgcgtatgcaggagtcagccgcgatggactaccgcagcgaaccccgcgaacaatatgaaaacctgccggacaacccggtgcaccgcgtggccgagacgccggtgtccaccttcagcgtcgacgtcgataccggcagctacgccaacgtcaggcgtttcctcaaccaaggcagccttccgcccgaaggcgctgtgcgactggaggagatggtcaactatttcccctaccactacgcgctgcccaccgatggctcgccctttggcgtgaccaccgaagtcgccgccacgccgtggaacccgcatacccagttgctgcgcatcggcatcaaggcgtccgaccgcgccgtggcgcaattggcaccggccaacctggtgttcctggtggatgtgtccggctccatggaccgccgcgaaggcttgccgctggtgaaaagcacgctgaagttgctggtggatcaattgcgcgaccaggaccacgtttcgctggtggtgtatgccggtgaatcccgtttggtgctcaagcccacctccgggcgcgacaaggccaagatccgcaacgccatcgaccaactcaccgccggcggctccacggcgggcgcgtccggtatcgaactggcctaccagatggcccgcgaaggctttatcgacaagggtatcaaccgcatcctgctggccaccgacggtgacttcaacgtgggcatcagtgatttcgacagcctcaagcaaatggcggtagaacagcgcaaaagcggcgtgtccctcaccaccctgggcttcggtgtggataactacaacgaacacctgatggagcaactggccgatgccggcgacggcaactacgcctatatcgacaacctgcgcgaagcgcgcaaggtgctggtggatcagctcagctcgaccttggccgtggtcgcgcgggatgtgaagttgcaggtggaattcaacccggcgcgtgtcagcgaatatcgcttgcttggctatgaaaaccgcgccttgaagcgtgaggatttcaataacgacaaggtcgacgccggtgagattggcgcagggcatacggtcacggcactgtacgaaattgtgccgaagggcgagaaggggtggttggagcctctgcgttacgccactgcgcctgtggccggggataaatccgctgaactggcgatgctgcgggtgcgctacaagcctgctgtggacggtgccagccaactgatcgaacggcccatcagccaggaaccctccaaagccagtgacgacctgcgctttgcggcggcagtggctgcctttgcccaacagctcaagggcgatggccgctacactggcagcatgagcctgcaggacaccgccgcactggcccgctcggcccggggtgatgacccgttcggcttgcgcaacgagttcgtgcaactggtcgaactggcccaaagcctcaaaccctgatcatagccatgacaacaatcaaatgtgggagggggcttgcctccgatggcggtgtatcagcatcaagtgtgctactgacccactgctatcgggggcaagccccctcccacagttagaccagcttcggctgataaaaaggagttcgccccctacatggctgttccagatgatctacccagcgacgaatcgctgctggcccgctaccgcaccggcgacagcgccgcgttcgaagccttgtacgcacggcaccgccagggcctgtaccgattccttgtgtccttgagcaacaaggccgaactggccgaggaaatctaccaggagacctggctcagtctgatccgcagcgccacccagccacaaggccgggcgagttttcgcacctggctgttccagatcgcccgcaaccgcctgatcgaccactggcgcaagcacggtgtccataacccattgcacgacagctacgacgaacaattgcatgcccaggccgacgacagcgccggccccgagcagcaactgagcctgagccgcgaccaggcgcggctcgatgccgcgctgcaagacctgcccgaagaccagcgcgaagtcttcctgttgcgcctgcacggcgacctcgaggtgccgcaaatcgccgccctcaccaacgccccgctggaaaccgtgaaaagccgcctgcgttacgcccagcagaaactgcgccgcctgctggccgaggagatacccgcatgatcgactcccgaaacactccagattccgacgacgaattgttccagcactatcgtcaacacagctccgtcgagccgccggcgtccctcgacgccttcatcctcaacgccgcccgccgcgaagccccggcgccgcagccgaacctgtggcaacgctggctgcaagcctgccaacggccgcgctggcagatggcattcgccaccgttgcagggttggccctgatgatcggcgtggtgatgcgctcgcctgtgccgcagcccgacatttccaccgcgaccttctctgcgctgcacgacgaagcaccgcgtcccgcggcacccgcgatgtccgcgcctgcccccgtcgcccgaatggccgccgcgccccaggcagagagcgcgcaagtcatgggttcgatggcggatgagtccagcgccaaattcagcaagcgtgcgccggtggcgttgccttcgttggaggaggggttgcaggagattgttaggttgcgtgaagtgggagaaagcaaggcggcagatgaatacctgctggcactctacaagcgtttccccgaagaagatttgcctgcgcggttggaggcactgcaaaagcgttaggcggatgcggctggtttgaactctccgcagagttaatacaaaaaaagccccaggcctttcgacctggggctttttcatctgtatatggtgcacccggcgggattcgaacccacgacccctgccttcggagggcagtactctatccagctgagctacggatgcttgtgcgggcgacatcatacccatgtcgaccttgggcgtccatgctggtctttgggcatccaagtgtaggaattcgctgcataaaggccctgggccgggcaccactcatcagaagggtagaacccggaccaacgacgctgatcagaaagatcgactaaaagcgccgttttcgttctttttttcgaacagactattgccctgcccccccattgatcctaggattcgtttgagatttcaaacgctctgtctcccgcgcgctattcacgctatcccgcgtgctggggctgatttccctgacggcagcccacaaggcgcctttcaacaactctaattcgctccgcgtgcgcgcggtgctgttaaggaaacccgacatgcagctcaaagatacccagttgttccgccagcaagcctttatcgatggcgcttgggtcgatgcggacaatggacagaccatcaaggtcaacaacccggccacgggcgagattcttggcaccgtgccgaagatgggcgccgctgaaacccgccgcgccatcgaagccgccgacaaggccctgccggcctggcgtgcactgaccgccaaggagcgcgccaacaagctccgccgttggttcgaactgctgatcgaaaaccaggaagacctcggtcgcctgatgaccctcgagcaaggcaagccactggccgaagccaagggtgaaatcgtctacgccgcctcctttatcgagtggttcgccgaagaagccaagcgcatctacggcgatgtgatcccgggccaccagccggacaagcgcctgatcgtgatcaagcagccgatcggcgtgaccgccgcgatcaccccgtggaacttccccgctgcgatgatcacccgtaaagccggcccggccctggccgccggttgcaccatggtgatcaagcctgcttcgcaaaccccgttctcggccttggccctggttgaactggcgcaccgtgccggtatcccgaaaggcgtgttgagcgtggtcaccggcagtgccggcgacatcggcggcgagctgaccagcaacccgatcgtgcgtaaattgtccttcaccggctcgaccgaaatcggtcgccagctgatggccgaatgcgccaaggacatcaagaaagtttccctggagctgggcggcaacgcgccgttcatcgtgttcgacgacgctgacctggataaggccgtcgaaggcgcgatcatctccaagtaccgcaacaacggccagacctgcgtctgcgccaaccgcctgtacatccaggactcggtgtacgacgcgttcgccgagaagctgaaagtggcagtggccaaattgaagatcggcaacggtctggaagaaggcaccaccaccggcccgttgatcgacgaaaaagccgtggccaaggtgcaggaacatatcgctgacgccctgagcaaaggcgccaagctgctggccggtggcaaagtgatggaaggcaacttcttcgaaccgaccattttggtcgacgtgccgaaaaacgcggccgtggcgaaggaagaaacctttggcccactggcgccgctgttccgcttcaaagacgaagccgaagtgatcgcgatgtccaacgacaccgagttcggcctggcgtcctacttctatgcccgcgacctgggccgtgtgttccgtgtggctgaagccctggagtacggcatggtcggcgtcaacaccgggttgatctccaacgaagtggcgccgttcggcggcatcaaggcctcgggcctgggccgtgaaggctccaagtacgggatcgaggattacctggaaatcaaatacctctgcctgggcatctgacccggcaagagcttgcagcaaacgcaaagggcacgagagcgctgaccctttgcgtgttttaccccgcaattcgtagtgaccgggaaagctgtggcagtcgatcatcgcatgctgccgtagttgcctccccgccacgtattccttggaccacgccacccgatgagtggcgaatgaggactttatgagcaagaccaacgcatccctgatgaaacgccgcgaagccgctgtaccgcgcggtgttggccagattcacccgatctttgccgaatcggcgaagaacgccaccgtgaccgacgttgaaggtcgcgagttcatcgacttcgccggcggcatcgccgtgctgaacaccggccacgtgcacccgaaaatcatcgccgccgtgaccgagcaactgaacaaactgactcacacctgcttccaggtactggcctatgagccttacgtggaactgtgcgagaaagtgaacgccaaggtcccaggcgatttcgccaagaaaaccctgctggtcaccaccggttccgaagccgtggaaaacgccgtgaaaatcgcgcgtgccgccacggggcgtgccggtgtgatcgccttcaccggcgcctaccacggccgcaccatgatgaccctgggcctcaccggtaaagtcgtgccttactcggccggcatgggcctgatgccaggcggcgtgttccgcgcgttgttcccgaacgatctgcacggcgtgagcgatgacgattccatcgccagcatcgaacgcatcttcaagaacgatgccgagccgcgtgatatcgctgccatcatcatcgagccggtgcagggcgaaggcggtttctacgtcgcgccgaaatccttcatgaagcgcctgcgcgaactgtgcgacaagcacggcatcctgctgatcgccgacgaagtgcaaaccggtgccggccgtaccggtacgttcttcgccatggaacagatgggcgttgctgccgacctgaccaccttcgccaaatccatcgctggcggcttcccgctggccggtgtgtgcggcaaggctgaatacatggacgccatcgcgccaggcggcctgggcggcacctacgccggtagcccgatcgcttgtgcagctgcgctggcggtgatggaagtgttcgaagaagagcacctgcttgaccgctgcaaggcagttggcgagcgtctggtgaccggcctcaaagccatccaggccaagtacccggtgatcggcgaagtgcgtgccttgggtgcgatgatcgcggtcgagctgttcgacgacggtgacacccacaagccaaacgcggcagctgttgcttccgtggtggccaaggcgcgtgacaagggcctgatcctgctgagctgcggcacctacggcaacgtgttgcgtgtactggtcccgctgacctcgccggacgagcagttggacaaaggcctggcgatcatcgaagagtgcttctccgagctgtaagagaaagttgacctgttcgacagaaaaaacccgcttcggcgggttaatgagatggtcacccccaacaccctgtgagggctacgctttcacagggtgttttgttttcggaggccatcatcatgagcgagtcagcactgatcgggatcgatctcggcaaa

SEQ ID NO: 20 - DNA, 333954 bp, Pseudomonas nodulensis
  misc_feature (25807)..(25848): n is a, c, g, or t
  misc_feature (201635)..(201701): n is a, c, g, or t
ggcgcgactctcatcgtggcgctggggcaagccccaaacagacgccggatagatttaagcaagccaaccacaccacccgttaatcagtattgcaaaaatgggggtgaccatagatttttatgcccattgccgcacattcagcccgtgttcattgtacgtaggcggctccattgactaaggttgcaagcattgccgatggagcgtgctggatgactgctgttgatttacccgctgtaccccgcgtgttgattgccgaggcggacccttggtcgcgggacctgctcaagcaagtgttgttgaatgtgcgctgcgatgcgcggctggatgtgtgtgcggacggccagcaagcggcgaccctgctgcgggataaggcctacgacctgatcctggccgattgggagctgccgggcatcgatggcctgagcctgctgcgcagcgtgcgccagaagcgtcgctcgcctttgctgccgttcattctgctgagcagtcgcaatgacagcgccagcgtgcgcgaagccttgcccctggcgcccacggcgtacctgaccaaacccctgaacatggaaggcctgacccagcgcctgcaggacctgctgctcaacgaaggcgaaacggtgtactgcgagatcccaccgttggcgcccggcatgaccttgccagtgttccttgagcgacgccgcgaagcgtccgacggcgcgccattgcgggtcgatgtgaaagccgccgtgcaacacagcctcgggccggaaggcctggacctcaagcatctggaagaccaggtgcgcatggacccgcaaatcaccgccgtgctcatcgccgccgccaacagtgccggccatcacggcgcaccggtgcagaccctgcccggcgccctgcacaagctggtgccggggcaaagcatgaacctgatcctgggcctggcgctcaagcacaacgtggtactcggggacccggcgctggtcgcctatgccgagcggcactggcaagtgtcccaggacactgccgactacgcccggcgcctggcccgcatgcttgagctggatcacgaacgctgctacagcgcggggatcctccatcggctgggcgacctggcgctgttgcgctgcctggaggactggcgccagggtggcggtgaactggatgacgaagcgattggcgagtccctctacacctttggcgctgcctatggctcggcactgcgtgcgcgttggcgcttgccgttggagctgcgccagttgattgcggcgatttactcgttggagggcggtgtgtatgcgcgggatgcgctggtggtgaatctggcggcgcagatggcgcgtttgactgagcatgaaggcctggaagaactggcggcgggcaagacggcgcgattgctcaaggtgggcttgtcggagctgacccgagtgcgcaaatcctaatgtgggagggggcttgctcccacctttgagcagtgttgactactagcccgcgatcacgcggttcttgcccaggcgcttggcctcgtacatggccgcatcggcacgggcgaacaggctgtccagggtcgagtcgtgctcggtgaggctggccaggccctggctgatggtcacgctgaaggcctggccttcgtagctgaagctgagttcctggatctcccggcccaggcgctcggccacctgcagtgccatctccggcgcacagccgggtagtaccgcagcgaactcttcgccaccgatgcgcccgaacagatcgccacggcgcagcacccctcgaccgctctcggcgatacgccgcagcacctggtcgccctccaggtggccgtagctgtcgttgatgtccttgaagtcatcgatgtccagcagcagaaaggccagcggcgcaccttgggcacaggcactgtcgaaggcctggttggcgcattcgaagaagtgccggcggttgctgctctgggtcagcacgtcggtggtggcgagacggtgcagctccagttccagctgtttcttttcggtgatgtcttcggccatgcccactacgatcagcggctcaccgggctcgacctgctggttcatgtagcacttgtcactcagccagcggatctgcccgtcggcagtgatgatgcggtactcgcggtcttccacggcgccctgttccagcacacgagccaggctgtgttcggcgtagtcgaggtcttcggggtggatgctgttgcgccattcccggtggtcggccagcagcagaccggcagagcgcccgaagacgcgttcgtaggccgggctcacgtacagcacgcggcgggtttcccaatcgatggcccacagcacggcattcacgctgaccagcattgagctcagcagttgctcacgttcgctcagtcgctcgacttcgccctgggcatgcaccagcgccagcagggtcgccgccgctgctgggcggggatgctcagctgctggcgcgtcgattaaggaggacttttcgtgaaccatcggcacaactctctctgggcgcgccgcaaacaggagcagcggtcactacaaggggccaccatgatggcgaagtgttcattgagagaggcgaatttcagtgaagttccgtcaacaggaccgattgccggtgcccggtaaatgacgccaaaaagctgataggtgggagggcaagccctcccaccgcagcatcagaccgccgcaggacgcagcgaataagtcttcaattggtgcgcaaaatcccgcagggactggatgccgctggcctcggcctcatgcacccattccttgatggccgccagcatatcgtggccattggagctggtcttgagccagatctgctgcagcgccaggcgcttttcgtagatcactttcagtgcatggctgtgttccagcaggctctggatgcgcacgtgatggcggtcatccagcaagctggtttcccgcgacagcaggcgcttggcgcggtggaactgatggcgcaccgagtgatcgaccttttccagctcctgcttgaccagcgggccgatcaccaacttgcggtattgggccatgatctggaagcggttgttgaggatggccatggcggtatccatgtccaggtggcccttgccttccacgcggtgggcaataggggcgacacgctgcaccttggccaggcgcaggaagctgaacaccttgatccacgcccagcccaggtcgaactcccattttttcaccgacagcttggcggagttggggtaggtatggtggttgttatgcagctcctcgccgccgacgatgatgccccacggcaccaggttggtcgccgcgtcacggcattcgaagttgcgatagcccacggcatgccccaggccgttgatcacgccggcggcccagaacgggatccacatcatctggatcgcccagatggtaatgccgatggtgccgaacagcagcaggtcgatcacacccatgatcgccacgcccagcagtgggtagggggtgtagattttgcgttcgatccagtcgtccgggcagttcttgccgtagatacgcagggtttcggggttttcggcttcggcgcggtacagctcggcgcctttgcgcagcacagtggacagccccttgatgaccgggctgtgcgggtcatcgacggtttcgcacttggcgtggtgcttgcggtggatggcagtccactcgcgggtgttctgcgccgtggtcagccacagccagaagcggaagaagtgtttcaggccggcattgagctccagggagcgatgggctgaataacggtgcagatagaccgtgaccccaacaatggtcacgtgggtcatcaacagcgtgactgccaccagttgccaggctgataggtcaagaaaaccgttgtaccacataggctgtatggccctcagataaagaaaagaacagctcaagcattatcactaagcctacagagaaaaccagcgaccctttcagataagacttacgagatgttacttattctataatccgcagcgtttatagggcgattatgtttttttggtaaggattactgaccatatgctgtattcataccgtggtgccctacgcgcggggctggtatacctgctggtttctgtcgcatggctccagctcagcaaccacttattgatcagctttctcgatgaaccgcgggagttgggacgctggctgcaagtgcggggctatgtgtgggtggccctcagcgccctggcgatttacctgatgtgcgcccgatttgcgcgtgccaaccagttgcagcaaccgttgaaggaaaaccgcgaacgcctgcgccaggccgccgccgtgtttgattgcacccgtgaaggcgtgctggtcaccgacgcgcaagggctgatcgtgcacgtgaaccgcgccttcatggcgatcaccggctacagccgcgaagacgtcatgggccagcagcccagcttgttcaagtccgggcgccattcgtcgcatttctaccagcagatgttccagagcctggagcgtaccggcgaatggagcggtgaaatctggaaccgacgcaaaagcggcgagatttacccccagtggcaaaccattcgcgtgattcacgatgaccagggccacgtcagccattacgtcgcggtgttttccgatatcagcgccatcaaggactccgagcacgaactggcccacctcgcccatcacgacccgctgaccgacctgcccaaccgcctgctgttcaccgaccgtgccgaacaggcgctggcctcggcgcagattcacaagcgtggttgcgccttgctgttgctggacctggaccacttcaaaatcatcaatgacagcctgggccataacgttggcgaccagttgctcaaagtcgtcggcgaacggctcaaggcgttgttcggcccgggcgtgaccctggcgcgcctgggtggggatgagttcgccgtgctggcagaaagttgtccacaggtggcccaggctgcgggcctggcgcaacgcatactggaggcgctgaaacagccatttatctttgacggccaccagctgtttatcagcgcgagtattggcatcagcctgttccccagcgacgccttgagcgccgagcagttactgcgcaacgccgattccgcgttgttcaaagccaagagtgctggccgcgaaggttatgccctgtacaccgaagaactgaccgcccatgcgcagaaccgtgtagagatcgccagtgagttgcgccgtgcgcttgaacagcaggagctgtgcgtctactaccagccggtgcacgacctgaacggcagccgcctgatcggcgtcgaagcactggtgcgctggcagcacccggagcgcggtctggtgccgccgggcgagttcatcccgattgccgagcgcaccggcctgattgccgatatcgacgcctgggtcatggaccgggcctgccggcaaatgtgcgactggctggggaatggggcgccactgagttttatcgccatcaacgtgtccagccgcctgtttgcccggcgcgagctctacgaacaggtcgcccaggtgctgcacgacacgggcctggatccggctttcctggagttggaagtcaccgaaagcgcggtgatggacgacccggaagtagccctggaacaactgcaccgcctgcgcgaactgggcctacgcctggccatcgacgacttcggcaccggttattcctcgctgttgcgcctcaagcgcctgccggtgcagaagctcaagatcgatcagggcttcgtcgccgggttgccgtgggacgaggacgatgcagcgatcgtgcgcgtggtgatcgccctggcaaaaagcatgggcatgcaggtgcatgccgaggggatcgagcaggtggaacaggcgcggttcctgttggatcagcagtgcgatatggggcaggggtattggtttggccggccgatgccggcgggcgaactagattggtccaaggcacccgcgatccgaacctgaaatgctttcaaatgtgggagtgggcttgcccccgatagaggtgcatcagcccctcattagttgactgacactccctcatcgggggcaagccccctcccacatttgaaagcgatctgcgcgcaaccccgcgtcccaccagaaaattctttctggttatataaacattcttaaatagtatttttaagaatatccgcgcttatctactatcgccctcacgccgcaagcagtgccgccactgcgaggcactattcatttcaggagcgagaccatgagcgcatctctacgtagcgtcgacggccaggacgaagcagccattttgcgtgagatccagagcgccctgcgcgatctgcggtttggcgcggtggaaatcacggtgcacaacgcccaagtggtccagatcgaacgcaaagaaaaattccgcctgcagaacccgggtaacaaaccgagctgagcaagaacggcgatagacccgcaactataaaaaaagccaacaccccaagaatttcaggagcttctatgtcgtcgattcgccgttacgccctggccgccctggccagcgccgtgtttgcaggttccgcggttgccaaggactacgagttgctcaacgtctcgtacgaccctacccgtgagctgtaccaggactacaacgctgagttcaccaacttctggaaacagtcccacccaggcgacaacgtcaagatccagcaatcccacggcggttcgggcaagcaaggccgtgccgtgatcgacggcctgcgcgccgacgtggtcactctggccctggccggtgacatcgacgaaatcgccaagctgggcaagaccctcccggaaaactggcagacccgcctgccggacgccagcaccccatacacctcgaccatcgtgttcctggtgcgcaaaggcaaccctaaaggcatcaaggattggggcgacctgatcaagaaagacgtgtccgtgatcaccccgaacccgaaaacctccggcggcgcccgttggaacttcctcgccgcctgggcctatggcctcaaggccggtggcagcgaagccaaggcccaggaatacgtgaaggagctgttcaagcacgtaccggtgctggacaccggcgctcgcggctcgaccattaccttcgtcaacaacggtcagggtgacgtgttgctggcctgggaaaacgaggcgttcctggcgctcaaagaagacggtggcgccgacaagttcgacatcgtcgtgccgtccctgtcgatcctcgccgagccgccggtggccgtggtcgacaaaaacgccgagaaaaagggcaacaccgaaatcgccactgaatacctgaagcacctgtacagcccggctggccaggagattgcggcgaagaacttctaccgcccacgcgatgcaaaagtggctgccaaatacgcccagcagttcccgaaactggacctggtgactatcgacaaagacttcggcggctggaaaactgcccaaccgaaattctttaacgacggtggcgtgttcgaccagatttacaccgcgcagtaagccgagcaacaacccgcccacagagcccgcattcacctgcgggttttgtgtgtcagttcccttaaccaaggactcttatgtcgcgtcgtatctcccccgtcatacccggcttcgggctgacgctgggctacaccgtggtgtacctcagcctgatcgtactcatcccgctggcggcgatgtttgtacacgccgctcaactcacctgggatcagttctggaacatcatctccgcaccgcgtgtgctggcggcgttgcaactgagcttcagcaccgcactgtacgccgcgctgatcaatggcgtgatcggcacgctgctggcttgggtgctggtgcgctacaccttccccggtcgcaaggtcatcgatgcgatgatcgacttgccgttcgccttgcccaccgctgtcgccggcatcgcactgaccgcgctgtacacgcctaacgggctggtcggccagttcgccgccgacctgggcttcaagatcgcctacaccccgttgggcatcaccctggcgctgaccttcgtcaccctgccgttcgtggtgcgcacggtgcagccggtgttggccgatatcccccgggaagtcgaagaagccgccgcgtgcctgggtgccaagccgttgcaggtgttccgccacatcctggtgccggcgctgctgcccgcctggttgaccggttttgcgctggcgtttgcccgtggcgtcggtgagtacggttcggtgattttcatcgccggcaacatgccgatgaaaaccgagatcctgccgctgctgatcatggtcaagctcgatcaatacgactaccgcggcgccacgtccattggcgtgttgatgctggtggtttcctttgtcctgctgctgctgatcaacttgttgcagcggcgcatcgaacgtccataaggaggcgcggaacatgtcccaatcgtctatttccgccgcgtcctcggccaacgctgcccgccgtggcagcgccgcgtcgcgacgcatcctgatcggccttggctggctggtgttcgccctgttcctgttgttgccgctgtttatcgtggtgacccagggcctgaagaacggcctcggcgcgttcttcaccgcgatcctcgaacccgacgcgctgtcggcgttgaaactcacggtgatcgccgtggtgatctcggtgccgctcaacctggtgttcggcgtcagcgccgcgtggtgcgtgagcaagtactcgttccgtggcaagagcatcctggtgacgctgatcgacctgccgttctcggtatcgccggtgatcgccggcctggtctatgtgttgatgttcggcgcccagggcttctttggcccgtggttgcaggaccacgacatccagatcgtgttcgccttgcccggcatcgtgctggcgaccatcttcgtcaccgtgcctttcgtggcccgtgaactgatcccgctgatgcaggagcagggcacccaggaagaagaggccgcgcgcctgctcggtgccaatggctggcagatgttctggcatgtgaccgtgccgaatatcaaatggggcctgatctacggcgtggtgctgtgtaccgcacgggccatgggtgagttcggcgcggtgtcggtggtgtccggccacattcgcggcgtgaccaacaccctgccgctgcacgtcgagattctctacaacgaatacaaccacgttgccgcgtttgcggtggcgagtctgttgctgatcctggcgctcttcatcctgctgctcaagcagtggagcgagaaccgtattaaccgcctgcgcgccggtgcggctgaggaataagtcatgtcgatcgaagtccgtaatgtcagcaagaacttcaacgccttcaaggccctgaacagcatcaacctggacatccagagtggcgagttggtggccttgcttggcccgtccggctgtggcaagaccaccttgctgcgcatcattgcaggcctggaaaccccggatgacggcagcatcgtgttccacggtgaagacgtctccggccacgacgtgcgcgatcgcaacgtcggttttgtgttccagcactatgcgttgttccgtcacatgaccgtgttcgacaacgtggcgttcggcctgcgcatgaaaccgaagaaccagcgcccgagcgaaagccagatcgtggtcaaggtccatgagctgttgaacatggtgcaactggattggttgtcggatcgctacccggagcagctttccggtggccagcgccaacgtatcgccctggcccgcgccctggcggtcgagccgaaagtgttgctgctggatgagcccttcggcgccctcgacgccaaggtgcgtaaagaactgcgccgctggctggcacgcctgcacgaagacatcaacctgacctcggtgttcgtgacccacgaccaggaagaggccatggaagtcgccgaccgcatcgtggtgatgaacaagggcgtgatcgagcagatcggctcaccgggcgacgtctacgaaaacccggccagcgatttcgtctatcacttcctcggtgattcgaaccgcctgcacttgggtgaagacaagcacgtgctgttccgtccacacgaagtgtcgctgtcgcggcatgagctggaagaccaccacgccgctgaagtgcgggatatccgcccgctcggcgctaccacccgtgtgaccttgaaagtggaaggccagagcgagctgatcgaagccgaagtggtgaaagaccacgacagcctgaccggcctggcacgcggcgagaccctgttcttcaagcccaaggtctggcagaaagcctgataaccccgcactacccaatgtgaaaatggggccaatgtgggagggggcttgccccctcccacatttaggcctctctcggcttcagatcgcgtcgaaccaccggtcccgagcgctcctctatctgttgcttcaaaccctgccgcaaccccagcagaaacgccaactccgccaccacaaacaacggcccgacgatcagccccgacacatcatcgacaaacgcaggcttcctgccttcgtagtaatgcccgacaaactgaatcacccaacccaccacgaacaggccgatgccgctgctgagccacaccagcgtgctctgcgccgccagcacgtgtccggcccacaccgacagcgccatcagcacggtcatcaacacgcccagggccaattccaggcgcaggtaaaaccacgcagagaacagcgcgagaagaacggcgggtgagatccatatgccagcgacggcccattccgggcgtgacaacaacaccgcaaccgccaccacgatcagcgggatgccaacaaagtggctggcgatattgcgcggatcgcggtggtaggcagcgtattgactcaggtgatcgacgaggcttttcattgttattcctcctgtaggatgtttgatcatgccccgtcagcctgtggcgaactgtcagctgggcgacaatcttcggagttcacatggacgcagaacaatggcgcgcccggttggccagcggtcactggttcagccacctggcggcgccttttcagcatagtctgctggcccatgcccggctgcggcagctgacggcggggcaatacctgttcaagcgcggcgacccgccctgtggcttgtatgcggtgctcgacggcaccctgcgggtcagcgcggtgaacgagcagggcaaggaggcgatactcagcctggtggaggcacctttctggttcggcgaaatctgcctgttcgatggcctgccgcgcacccacgacgcctgcgcggtaggtcccagcacactgttgcaggtgccgcagcaggcgctgctgggcatcctggacgagaccccgcgatactggcgcgacctggccctgctgatgagccagaagctgcgcctgagtttcatcggcctcgagcagctcagcctgatgccggccccggtgcggctggcccaccgcttgttgatgatcgtcgagggctacggcgacaacgaacatgctaaacgcgtgctgcaattgccccaggaagacctggcggccatgttgaacctgtcgcgccagaccaccaacgctttgctcaaggacctgcaagccgccggcgtcgtgcgcctgggctacggcgagatcgaaatcctcgacgtacagcggctacggcaggcggcgcacccctgagggtgttagcctgcacgcctatcaatcgaggtgtgttatgcgcgtgctgttagtggaacatgaatccgacgaggcacagcggatggccgtgggcctgaacgaggccggctacaccgtggaggtggcggccaatggcatggcggcgttgcgcttggttgaaagcaccgagtacgacctggtgatcctggatgtgatgctgccggggctcaatgcctggaagttgcagcaggcgattcggcagaagggccagacgccgatgttgttcctgaccacgcccggcgggattgaagaccgcctgcgcgggttggaattgcatgaggatgactatttgctcaagccatttgcggccaagacgctggtggcgcgagtgaagaagctgctgcggcgggggcggtgactattctgatgctatcgggggcaagccccctcccacatttttgaacgtattcacagatcaacagtgggagggggcttgcccccgatgaggccctcccagccactacaaatccctacctcagcccatcccgaaactgccccggcgtcattcccgtccagcgcttgaacgcccggttgaagctgctggtatcggcaaagccgagcaaatgactgatctcggccaatgagcactgtgggtcgcgcaagtgcagcaaggccaggttctcgcggcactcattgagcagcgcatcaaaccggcagccttcatccgccaggtgacgctgcaagctgcgcaggctcaggtgcagcgcctgggcgacgcgttcggcacttggctcgccgtcgggcaattgcgcttcgatcacccgacgcaccttgcgctcccaggtcagtggctgcaattgagcgagggtgcgcttgagcacggtttcgttgtgctcggccaactcagggttggcgtcgtccaggtggctgtcgaaatcgatggcggcaaactccaggcggtcttcttcggcgccgaaaaataccggcgcacgaaacaccgtgtgccacggcttggggtctgcgggctcgggtcttcgcaggtacaccgccagcggcgcgtattcacgccccaggcgattgcggcaggtgcgcacgtagattgctgcaaacgcatcgatggcttcgaaagccggcgccgggttgccgggcagttgcaacaggcgaaaccgatagcgctcgccatcgccgctcagctccagggtcagcgcatcgctgaccacctggtggtagcgcacgatgcgctcgaacacttcccgcaggctgccgctggccaccagcgcatagcccagcgcgtgaaaggtggtggggctgacgaaccgcgacacccgcaaaccaatcgccgggtcgccgctggcctgcaccgccagcgcccacaaacgcgtggtcgccgacagcggatagcgcgcgttgggatcgtccatcagctgcgggtcgagcccggcttgcaggcacaacgcggcgctgtctaggcccagggcgtcgagttgcttgcgcagggcgcgggtccagctggcgagggaggtgggctcggtcatggcgattggcgcttgcggtcaacaggttggcgtgtgtggccgatgccctggcggaccgcttgggccaggatgcatccatcaatacaccagaggatggaagcatggacggtacttctgcaagtccccagcagatgaacgcacaacagcgctcggcgcatatccgtgacgtggtgctggccgagggcgtgcgcctgcgccagcagcatccctggctgctgcatcaggacgcgttgggcgcgggcatcctggcgtttgcgttgctgggcatgctcgggtcggcggcgctctacatcactggtcatatggcttggtgggtctgcctgctgcttaacgcgttcctggcttcactgacccacgagctggaacacgacctgatccacagcatgtactttcgcaagcagcgcgtgccccacaacctgatgatgggcctggtatggctggcgcggcccagcaccatcaacccgtgggtacgccggcatctgcacctcaaccatcacaaggtctccggcaccgaaaccgacatggaagagcgcgccattaccaacggcgagccctggggctttgcgcgcttgctgatggtgggcgataacgtcatgtcggccttcatccgcatcctgcgggccaagacctggacgcacaaactgacgatcctcaagcgctcgctgctggtgtacgcgccactggcgctgctgcattggggcgcgtggtatgtgttcctcggctttcatgccgccaatggcatcgccggcctgctgggtgcgccgatcgactggtcggccggcaccttgcagatgatgcaggtgatcgatatcgccgccgtggtgatcatcggccctaacgtgctgcgcaccttttgcctgcacttcgtcagctccaacatgcactactacggtgatgtggagctgggcaacgtgatccagcagacccaggtcttgaacccctggtggctgtggccgttgcaggcgttctgcttcaacttcggcagcacccatggcatccaccactttgtggtgaaggagccgttctacatccgccagatgaccgccaaggtggcgcacaaggtcatggcgcagatgggcgtgcgcttcaatgatttcgggacgtttgcacgggccaatcggttgggttttccagcgcctgcagggtttcgatcaacgccttcgccgcaggcgacaagcgcaccccagcgcggctgatcaccccgcagcggttgctcaggctgtccagggcgtgcggcaggttgcgccagtgcagtgcgtgcagctcgcccttgatgaactcctcgacaaacgcctcttcggcgcccaggccaatggcatcggactggcgcacgatggtggtcagtgcggcaagctgctccagctcgatggcgggcgcgaagtcgacgcgcccgctgagattggccagcagttttcggatgcccggcgcgatcagcggtgtggccagcgggtagccgaacaggtcgttggtggacaggctgtccttggccagcagcgggtgccctgcacggcagaaaaacacgctgcgccgaggtgtcagggccagggtctggaagttcgggtccgcctcgaagtgacgcacatcggcgataaagaattcgatctcttcacggctcaggctgcgcccgagtttttcccagttgtccacctgcaacacggtgcgcactctggggtaaaccgtgatgaaccgcgccatggcctggggcgccaggttcaccgcggccacggcgtcgctgccgaagcgcacttcgccggcgtcgagtttggtcatgcgcgtgacttcatggctcaacagcgccgcgccttgcaccaggctcaacgcgtgttgcagcaccacttggccttcgggagtggggcgcaggtctttatgggcgcggtccaccaacacgcagccgaactcttgctccaggccctggatgctgcggctgaaggcgggctgggtgatgcccatggcgtccgccgcacgcacaaaactacggtgctcgttcagcgcgatgaaatagcgcagttggcgaaggtccatggtgtgcccggcatcctgtaggagagccaggattttaagggcactacttattccgtcaacgaagcatttttgttttatctagatcttaaatgcatatctatagagcaggtgccgtgcggtacgtcgccgggctgaacacccgcgtcaccagcagcatggccacggctgtcaccgtcaacaccacccacgcgctgacaaagctgccggtgagttcacgcagccagccggtcatccatggcgaaatcgcattgatcaaaaagcccacgccctgcacgaacgccgccagttgcccggcctggcgcgggtcgcggtggtggtcgagggtcagcaacaggctcagggcaaaacatgctcccaggccaaagccgcacagcgccacccacaggtggggaaattccagcggcgccagcaacaggccgaggtagccgagggtctgggccagcaggctgatccacagcaatggccgacggtcgaccccgcgttgcgccagcaccggcatcaacagcgcggcgatcacctggaagatggtcatgaacgccagcagcgaaccgctgggcaacacgccccagcccagttgctggtagtaggccggcaaccacgccaccaggctcatgtagccgcagttcaccaggccgaaatacagcgccagcagccaggcacgccgattgcgcaggcccttgaaggcaggcggcacctgtgggtttttcgctgcgcccagcggcaaccaggcccacagcaataacgccgccagcgcgggtaacaaccacacacccaacccggcttcccagtgctggaaatacgtggcggccaccgggctgagcagcgccgccagaccgcctcccgccatcaacgaagccgagtaaacgcccatcgccacaggcacgcggtgatggaattcgcgcttgatcatcgccggcaccaacgcctggatcagtgccacaccggcgccgccgagcaaggccgtgaccagcagcgtcgagccctggcccatcagccagcgcgccaggcacgccagcaggatcatcagcaggcccagggcgatgccgcgtcgctcacccagttgcgcttcaacacgcacgcccaccagcgccaccaagcccatgcacaccacgggcaggctggtgagcagggcgctgctctggaagctgaggccggtgaccaggcggatctcgccgagcaacgggctgatggaactgaggatcggccgcaggttcagtcccaggaccaccagcaggccccagccagcgaaccgacctgcggttgaagagttgagcgacatgcagaacctatggcgtgtgcaaaggaggcgtgaagtatcgccagtcgccgaggtattctgaaattaaatataaccatgccaatcagtggcaaatggaatggtgagcgtcatgttcgatcctgtgttgttgcgcagctttgtcgccgtggtggactgcggcaatttcacccgtgccgccgagcgcctgcacttgacccagtccaccgtcagccagcagatccgccgcctggaagacgcggtggcgtgtcagctgctcgaccgcgaccaacgccgcgtggtggcgacggcggaaggcgagcgcctgctggcctatgcgcggcgcatcctcgcgttgcatgaggaagccgccgatgtcttgatcaaccagcaaagcgacggcgtgctgcgcctcggtgtgccggaagacttcgctgccgaacgcctgatgccgctgttatcggcttttgtgctggcgtatcccagggtgcgcctggaagtcaccagcggtctcggtcccgagttgcagcgccagtaccgcagcggtgagttcgacgtattgctggtcaagcaaatgggcgacagcgatgactgcctggcctcatggccggagccgttgtgctgggtggacagccgcagtacgccctccctggggcgcgacccgttgccgttggtggcctttccggtaggcggcctgtaccgcaatgaaatgctgcaacacctggaagtgggcggctggcgctggcgcatcggttattccagcgcgagcctggcgagtgtgtgttcggcggtggcggcggggttgggtatcagtctgttgccccggcgtgtggtgcaggccgggcatgtcgtattgggtgcggacagcgggttgcctgcggtgcagggcgtgcggctggcgttgtatgggcgcactggcctgggcgccgcggggcagagcctgcagcgccaattgctggatttgtgcgcaaacagcccggtctgaaccatgcctttgccgaatattttttatgcctggaaagcatgcaaaaacatcgcctggaggccagcccgtgcaggacggggctttggcgtttcagcatggtttgtttattcgttctagatctatgtataacctcaaagattactttaagagataagcatctggcccggatgattcgctcctcgacggccttcgatgcaggcctgtcggttttttgttttaaaaccgtaggagtgaatcaatgggcaatgtccagaccgccgccagtgcacacgaggcgccgtggcgccaggcaccgggtggtgagttggtcgaccttggccggccgcaccgcacgccgttggggcaattgcgcacgcagaaaacgccaaagcgtttctccagccgtcgtgaaggcatcctgctcggtctgctggtgctggtcctgcacggtgcggtgatctactgggtgagccagaagccgaccccggtgctgccgattgtgccgccagaaattccgccgatgaccatcgaattttcccagccggcgccgccggtgatggaaccgccaccgcctgtgccaacaccaccgccgcccgtggtcgagccaccgccgccggtggtggatgagttggccgccaagccggcgccgcccaaaccgattccaaaacccaagccgaagccagtgccaaagcctgagcccaagcccgcaccgaaaccggtcgagcaaccgcctgcgccaccgacacccgcgccgcctgcgcctcccgctccaccggcgccggccccggtaacgccggcttcggccaacgccgcgtacctgaagaacccggcgccggagtacccgtcactggctcagcggcgcggttgggaaggcacggtgttgttgcgggtgcatgtactggccagcggcaagccgggcgagattcagatccagaagagcagcgggcgccagcaactcgatgacgccgcactgaccgccgtgaagcgttggagcttcgtgccggccaagcagggcgatgtggcccaggacggctgggtcagcgtcccgatcgatttcaagattcactaactattcggctgcggtgtgttgcacacgccgcgacctgcacagagggaagacatcatggcattagcatctccacttgaatccatcgaaagcgcggtgatctggctgctggtggttttttcggtcgccacctggggcctggccctgctcaagggcgtgcagttcggtcgcctcaaggcgcaggatcgcaagttccataaacagttctgggcagcgtcgagcctcgactctgccgatgaactggcgcaaacccagccgggcgccgctgcccgcgtcgcccaggccggttatgccgcgatccaggtgggcgaaacttcgcacgctgctgacctgagccaggcgatcaaccaccaggaccgccttgaacgcgccctgcgccaacagattgtgcgtgagcgccgctccctggaaaccggcctggcggtggtcgccagtatcggcagcacctcgccgttcatcggcctgttcggcaccgtctggggcatcatggaagcgctcaagggcatcagcgccgccggttccgccagcctcgaaaccgtggccgggccgatcggtgcagccttggtggcgaccggtgtgggtatcgccgtcgcggtgccggcggtgctggtctacaactatttcctgcgtcgcctcaagctgacggctgccgaccttgacgactttgcccacgacttctacagcctggcgcagaagaatgccttccgcgtattgctgcacccaaccctaaacaaagccggcgccggcactccgcaaaaagtgaaggaggcctcctgacatggccttctccacgcaagacagcgatgaagtgctgagcgagatcaacgtcacgccgctggtggacgtgatgctggtactgctggtggtgtttatcgtcaccgcgccgctgttgaccaacgcgattccgatcaacctgcccaagaccgaggccgtggccccggtggagcagaaggacccgctggtggtgagcatcgacggcgccggcaaactgtttatcaacaaggacgaaatccagccggacctgctggagttcaacctgcaggcggccaaggccaaggaccctgatgtgcgggtgcaactgcaggcggatgatggcgtgaattacggcgaagtggcgcgagccatggcgtctatcgagcgcgcggggattaccaagctgtcggtgattaccgcacgttagttgcaaaagcctcgacaagtttttggccgtctccttggcagggtgcggcctttttttttgcctgcgattcaatcctcaagttgaaatgcgatcaaggtgggagggggcttgcccccgattgcagtgtgtcagccaatcaatctgtaactgatacaccgccatcgggggcaagccccctcccacattttgaacttcattagttttgagtttttggttattaataaatagcttcttattccttaacgaatataaaccccatccctatactgttcagcaacgttaaacgctgcaggagggcacacccatgcacagcgagtcgattcgttacctgatcgtgccgggctggcaaggatcgccagaagatcattggcaaagtcactggcagaacagcctgcccaacagcgctcgcgtggagcaggccgactggttcaccccgcgtcgcgaagactgggttgctgcgctggccgaggccatcgcggccgacagcacgccggtgatcctgatcgcccacagcctgggttgcatcacggtggcgcattgggcggccaccgcaccggtgcagttcctgcgccaggtacgcggtgccttgctggtggccccggccgatgtcgaacggcctgcctgctctcctgcgttgcgtaattttgcgccgatcccgaccgacctgttgccgttccccagccaggtggtcagctccgacaacgacagtgccgtcagcgccccgcgagccctggagctggcccgcaactggggcgccgaagccggcattctgtcgggggcggggcatatcaatgtgaagtccggccaccagcgctgggagcagggctttgcttacctctatcgcctgcaaagccgccttgagcatcacgcccggcgcagtgcctgattttttcaacgccccgtcccttgagtggattgggggcgggagcctgccatgagtctgcatgaaacctacggccagccattgctgacctttcccgacgcggaaaaaagcccgctgagtatccgcgccaaggcgttggtgtttgtcgacccgcgttcgcggcaactgcgcgaagacctcgaaagcctcgcaccgcgtgccttgcccgtgctgatccgtggcgagaccggcagcggcaaagaattgctggcgcggcatattcaccggggcagcgaccgcaccggtttgtttgtctcggtcaattgcggcgcgatcagcccgacctatgccgatgccgaattgttcggttatgccgccggcagccacagtggttcggccagcagccgggccggctggtttggctcggcgaatggcggcaccttgtacctggacgagatcggcgacctgccgctgccgatccaggtcaaactgctggccgccctggaaaaccacgaagtcacccgcgtcggtgcccatcagccgagcccggtggatgtgcgcctggtggccgccaccagcatcgacttggcccaggccgtggccgccggtaagttccatgagcgcctgtttcactacctgagcgaaggccggttggagttgccggcgctgcgcgagcgggtcggtgacatcctgtccctggccgaatacttcctgggcatctacagtcagcgcctggacctgccggtgccgctgatcagcgatgccgcgcagcgtgtgctggaacaccacagctggccgggcaatacccgcgagctggaaaacgttatccactttgccttgctggtcagcagcggcgacgagattttgcccgaacatttgaatctgccggtggcgggttctgcgctggaacaggtgcagcggattttcgagcgcgccagccctgccgagcgggaaacgttgagcaaattcctgcatgaacaaaatggaatatcaacgtgaataaaagatattgttcgggaataaaaaaactaggtattgtccctcccacgccgcgatagcacttcgctggcacactacataaaaaacggtcgtcagagacgccccggaatttcgataaggacactgcatgaaaaaggttctgttgtttaccgcactggcggctgccctgactgcaagcttcgcccaggccaacgagacactggtggtggccgccacgccgatcccgcacgccgagatcctcgaactggtcaagccgaccctggccaaagaaggcgtggacctggaaatcaaagtcttcaccgactacgtgcagccaaacgtacaagtcgcagaaaagcgtctggacgccaactacttccagaccctgccgtacctggaaaacttcaacaagggcaagggcaccaacctggtcaccgtggtcggtgtgcacgttgaaccgttcggcggttactcgaaaaagatcaagaacatctctgaactcaaagatggcgccaccgtggccattcctaacgaaggctccaacagcggccgcgccctgttgctgctgcagaaagccggcgtgatcaccctcaaagacccgaccaacgccctggccacgccaaaagacatcaaggacaaccccaagcacctgaaattcaaggagctggaatcggccctgctgccacgtgtgctggaccaggttgacctggacctgatcaacaccaactacgccctcgaagccggcctgaacccggccaaggacgcgctgatcatcgaagacgccaagtcgccgtacgtgaacttcctggtggctcgcccggacaacaaggacagcgacgcgatccagaagctgtccaaggccctgaccagcccggaagtcaaagccttcatcgagaagaagtacaacggcgctgtagtgcctgcgttctgatgtaacccaaacccccttcaaggtttgaacgccgacggctgttacagcgtcggcgtttttttatgcctgaaatctggaatgcaatccaaatgtgggagggggcttgcccccgattgcagtggttcagtcagcatattttttgctgacccaccgccatcgggggcaagccccctcccacatttgatccgctttgatctagagaactctgctattgatcgccctgcgcagcgccatcaaccacttcaccagttcctgcgggtccatcggtttcgcttcgttcattgttcgatccctcgaatctcagacctccaaaccatagctctcacccgccaaacccgcgaatccgccggttatctttttgggtgatatcaatatgctatttcggtatttaaaatttgctttttatacctttaaagttcgcgctacccggcgttacccacgccggatcggattgcgctcgctgcattacccttgcggcgtcatggactggaaatgaccttcgatttcgcttttatcctcagcaccctgccggcgtttctaaaggccgtgggggtgacgctgcaagtgggcctgatcgccattgccacctccctgctggtggcgctgatcaacgcggcgctgctggtgtttcgcacgccgtacctgtcgcgcctggtggcgctgtatgtggagctggcgcgcaacacgccgctgctgatccagctgttcttcgtgtacttcgcgctgcccgccctgggcttcaatatctccgggttctgggcggcaatcatcaccatgactttcctcggcggcgcctacctcaccgaagtgctgcgcgccggtgtggaagcggtgccgctggcgcagatcgagtcgggcaagtccatcggcctgtccgactggcagctgctgcgccatgtgatcctgccccaggccggcatcctcagcctgccggcgctgttcgccaatttcatcttcctgctcaaggagaccaccgtggtctccgccgtggcggtgccggagattctctacaccaccaagaactacatcgccctgtactacaagacttacgaaatgctcgccgtgctgacgctgatttgcgtgttgctgttcctgccgctttcactgttgctcagccgtctggaaaggaggctccagcatggccagttcgggtcttgagttgttgtgggtgtcgttgccgcaactgggcaagggtgctgcgcaaaccctgtcgatttcatttttgagcatcgccttcagcactgtcggcggcgtgttgtatggcgtgctacgcaccttgaacaaccggctggtcaacggcgtgctgcgggtttacctggagttgttccgtgcgatcccggtgctggtgtggttgtacctgctgtttttcggcctgccgattttctttggtttgagcattccgagcttctggtgcgcggtgctggtgctgtcgctgtggggcgccagtgaagtgggcgaagtggtgcgcggcgcgttgcattcgctgccccgtggccagcgtgaagcgggcttgtcgattggcctgtccgacccgcagctgtacggctacgtgctgctgccgcaagcgctcaagcgcatgacgccgccgaccatcaacgtctacacacgcattatcaagaccagttccctggcggtgctgatcggtgtggtggatgtgatcaaggtcggccagcaaatcatcgagcgcacctatgagtccgtgttgatttacggcgtgctgttcctgtttttcttctttatctgctacccgttgtcggccgcctccaaggtgctggaacggcgctggggccaggcatgaacgcattgatcgagttccagggtttcaacaaattcttcggtgagcagcaggtgctcaagggcatcgacctgagcgtgcaaagcggtgaagtggtggtgatcctcggccccagcggctgcggcaaaagcactttattgcgttgcctcaatgggctggaagtcgcccatagcggcagcctgcgtttcgccggcaaagagctgttggacaagcacaccgactggcgccaggtgcgccaggacgtcggcatggtgttccagagctaccacctgttcccgcacatgagcgtgctcgacaacatcctgctcggcccgctgaaagtgcaaaaacgcgacccccgtgaagcccgcgaacaggcggaaaaattgttggcccgcgtcggcctggcggacaagcgcgacgcgttcccgcgccagctctccggcggccagcaacaacgcatcgccatcgtccgttcgctgtgcatgaacccccaggtcatgctgtttgacgaagtcaccgccgccctcgacccggagatggtcaaggaggtgctggaagtgatccagggcctggcccgcgatggcatgaccctgctgatcgtcacccacgaaatggccttcgcccgcgccgtcgccgaccgcgtggtgttcatggaggccgggcgcatcctcgaacacaacacccccgaggcattctttacgaacccgcaaaccgcacgcgcgcagcagttcctggagaagttctcctttgtttcaacactgccgaagaaaacccaggaactggagctgatatgaaaaagttactgctgccactgtttgccgtcgccctgctggtcggttgcgataaaaaggccgaagagccggtaaaacctgccgctgtcagttatatcgaaaaaatcaaagcgcgcgacaagctgatcgtcggcgtgttcaccgacaaaccaccgttcggcttcgtcaacgaagcggggcgctacgtcggcttcgataccgacatcggtcgccaattcgccaaggacctgttgggcgatgaaaacaaagtcgaattcgtcgccgtggagccggccagccgcattccgttcctgcaaagtgacaaagtcgacctgatcctcgccaacatgaccgtgaccccggagcgcaaggaagcggtggacttcaccaaccccaacctgaaagtcgcggtacaggccctggtgccgaatgacagtgcggtaaaaagcctggatgacctggccacccgcaccaccatcgtcaccaccggtaccaccgccgatatctggctgaccaagaaccacccggactggaaactgctcaagttcgagaaaaactccgagtcgctgcaagcgctgtcggctggccgtggcgatgcctacgcacaggacaatctggtgctgttcagctgggccaagcagaatcccggctaccgcgtgctggaagagaaactcggtgatgaagcgccgattgcgccagcggtgaagaaaggcaacatcgaactgcgcgattgggtgaatgccgagttggccaagttgggcgaggagaaatttttgctcaagctgtatgaccagtatgtgcgtaaagaactgagcgatgacaccaagcctgaaagtgtgattgttgaaggcgggaagtggcagggctgattgttgattgattgttctggcctcatcgggggcaagccccctcccacannnnnnnnnnnnnnnnnnnnnnnnnnnnnnnnnnnnnnnnnntgtgggagggggcttgcccccgatgaggccagagcagccaccgcctattccggccaatgccaggcgggggcatccaatatcccctgcccgacgatccgggtttcccccagcaccttctccagcaaaatcgaattacacccctcgtcctgctgcaacgccgcaatcaagcggctggcatgggacaccacccacacttggcactgccgcgacgcctggataatcaagcgcgccaacgccggcagcaaatccgggtgcaggctggtctccggctcgttcagcaccatcatggtcggtggccgaggcgtgagcagcgcggcgatcagcagcaggtagcgcaaggtgccgtccgacagctccgccgccgacaatggccgcagcaaaccttcctgataaaactcaatcgcaaagcgcccgccctgcaagggctcgatattcaggcgcgcgccggggaaagcgtcgctgactgcgcgctgcaatgcctcgggatcgccgatttcacgaatcgtctgcaacgccgccgccaggtcgcgcccatcgtgatgcagcactggtgtgcgcgtgcccagttggggttgacgtaccggcgcatccacatcgctgcgaaagtgatcgtaaaagcgccagccacggatgctttcgcgcagcagcaacacctccggcgaaccgcgcaggctgccgacctggtcgaacaggctgtggtagttgggcgtgtgctgggccagcacatcccaggcgcggccctcgcgggcgcgcaccatggggccggagcgctgcaccagcaggctggcggggcgatagatatggccggcccagatgcattccttctttacttccgggtccagggagaaatacgacaaggtcttttccggcagccccagggagatggcgtagctgaaatcttcagcggcaaagcccaggcgcaggcgtttgacgccttggcgcacgatgggctccaccggcacttccccgttgcgcatgcgtcggctgatactttccggcccggcccagaaggtcgaatccaacccaccctcacgggccaacgcattgatcactccgccctgggcggtttccgccagcaggcgcagggcgcggtacaggttggacttgccgctgccgttggggccggtgatcaggttcagccggtccaggggcaccaccaatttattgatcgagcggtaattggccaccgcgagggtcttgagcatgggcatccagtcggcgtgggaaccattggagtatgggagcctccatgcagataaggaaccctgaactaagctcacagtcgcatacacactggcacgtcggcatcacgcaaaaggagcctgcatgggcgctcgcatttccacctgtattttcggccttggcctactggcgctgttgagcggctgtggcgaagataaggctgaacccaaggcccattcgcgggtgttcgtgcagaccgtgcagccggcggattttgctgcggcggtgaccctcacgggtgatatccaggcccgggtgcaaaccgacctgtcctttcgcgtgggcggcaagatcatccagcgcatggtggacgtgggcgaccgcgtgaccgccaagcaagtgctggccaagctcgatcccaaggacttgcagaccaacgtcgactccgcccaggcccaggtcgtggccgaacaggcgcgggtcaagcagaccgccgccgccttcgtgcgccaggaaaaactcttgcccaagggctacaccagccgcagcgaatacgattccgcccaggctgcgttgcgcagcagccaaagcgccctggctgccgcccaggcccaactggccaacgcccgcgagcaactcggttacaccgcgctgatcgccgaagcacccggggtgattaccgcgcgccaggccgaagtcggccaggtggtgcaggccaccgtgccgattttcagcctggcgcgcgatggcgagcgcgatgcggtgttcaacgtctatgaatccctgctggtggagccgccgccggatgctccgatcaccgtcagcctgctggataaccccagcatcaaggctgtgggcaaggtccgtgaggtcacccccgccgtggccgccaacaccggcaccgtgcaggtgaaaatcgccctgcaggccttacccaagggcatggagctgggctcagtggtaagcgccaccgccaatggcccggccaaggccagtatcgaattgccgtgggccgcgctgaccaaagacctcagcgaacctgccgtatggctgatcgacggcgacggcaaggcgcagctgcacaaggtcactgtggcgcgttacctcaccggcaaagtcatcattggcgacggcctcaagggcggcgaaaaagttgtggtggccggcgggcaattgctgcaccccggcatgattctcgagatcgcccagccaggagcccagccatgaagcgcctcacggggatactcgccgccagcctgttgctggtggcttgctccaaggaagagccgccgcccgagccggtgcgcccggtgctgtccatggaagtgaagtcggaagaccaggaaaaccttggccgcttcgccggcaccatccaggcccgctacgaaagtaacttaggcttccgtgtatccggtcgcattgcccgccgcgccgtggacgtaggtgccgaagtggagaagggcgccttgctcgccgtcctcgaccccaccgaccaacagaaccaattgcgctcggcccagggcgatctggcccgcgtgcaggcgcaatacatcaacgcccaggccaatgcgcgccgccagcaggaactgttcaaccgtggcgtcggcgcccaggcccaattggatatcgctcagaccgacctgaagaccacccaggcgtccctcgaccaggcccaggcctcggtcaatcaagccaaagaccagctcaactacgccgaactgcgcaccgaccacgccggtatcgtcaccgcctggaatgccgaggccggccaggtggtcagtgccggccagcaagtggtgaccctggcgcgcccggatatcaaggaagcggtgatcgacctgcccgccggcctggccgagcgtttgccaccggacgtggtgtttctggttgccggacagctcgaccccagcgtgcacaccaccgccatcgtgcgcgagatcgaaccccaggcccaaagcgccacgcgcacccgccgagcacgcctgaccctggccgaaacgccgcccgcgttccgcctcggcacggcgatcagcgtaacgttgagtactgccatcgcgccgcgcatcgaagtgcccctgagtgccttgcaggaggtcgacggccagacccgcatctggctgctcgacacccaaagccagaccgtgcaaccgcgcgacatcagcgtggtcagccgcgatgccgacagcgccttgctcaacggcggcgtcaaacccggcgagcgcatcgtcaccgccggcgtgaacagcctgaaacccgggcaaaaagtcaaaatcgacgaggacagcccgcgatgaaagggagcttcaacttatccgactgggccctcaagcatcagtccttcgtctggtacctgatgttcgtcgcgctgctgatgggcgtgttttcgtacatgaacctgggccgcgaggaagacccttccttcaccatcaagaccatggtgatccagacccgctggccgggcgcgacccaggaagaaaccctcaagcaggtcaccgatcgcatcgagaaaaagctcgaagagctcgactccctcgactacgtgaaaagctacacccggccgggcgagtccacggtattcgtgttcctcaaggacaccaccagtgccaaggacatcccccatatctggtacctggtgcacaagaagatcgacgacattcgcggcagcttcccaccggggttgcaggggccgtcgttcaacgatgagttcggtgatgtgttcggctcggtgtacgcgtttaccggcgatggcctgtcgatgcgccagttgcgtgactacgtggagcaggtgcgcgccgagatccgttcggtgccggggctgggcaaggtcgagatgatcggccagcaggacgaagtgatttacctgaatttctctacgcgcaaactcgcggcgctggggattgaccagcgccaggtggtgcagagcttgcaatcgcagaacgcagtgacgccggccggggtgattgaggccgggcctgagcggatttcggtgcgcacctcggggcagttcgcctcggagaaggacctggccaacgtcaacctgcggctcaatgaccggttctatcgcctggcggatatcgcggacatcagccggggttatgtggacccggcgcggccaatgttccgcttcaacggcaagccggccatcggtctggcgattgccatgcagaagggcggcaatatccagtcgttcggcaaagccttgcatgagcgcatggacgaactcactgccgacctgccggtgggcgtcggtgtgcacaaggtgtccgaccaggcggaagtggtggaagaggccgtcggcggctttaccagcgcgttgttcgaagcggtgatcatcgtattggtggtgagctttatcagcctgggcatgcgcgccgggctggtggtggcgtgctcgattccgttggtgctggcgctggtgttcgtgttcatggaatacagcggcatcaccatgcagcgtgtgtccctgggcgcgctgattatcgccctcggcctgttggtggatgacgcgatgatcaccgtcgagatgatgatcacgcgcctggaaaagggcgagaccaaggaacaggcggcgacctacgcttacacctcgacggcgttccccatgctcaccggtacgctggtgacggtcgcggggtttgtgccgatcggcctcaacgccagctcggcgggcgagtacaccttcaccctgttcgcggtgattgccgtggcgatgctggtctcgtgggtggtggcggtgctgtttgcgccggtgatcggcgtgcatatcctcagtgccaacgttaaacctcacaacgcagagccggggcggatcggccgggcgttcaatggcggcatgctatgggccatgcgcaaccgctggtgggcgattggcatcaccgtggcactgtttgtggcgtcggtgttttccatgcagttcgtgcagaaccagttctttccctcgtcggaccgcccggagatccttgtcgacctcaacctgccgcaaaacgcctcgatcaacgagacgcgcaaggctgtcgaccgcctggaagcgatcatcaaggacgacccggacatcgcccgctggagcacctatatcggccagggcgcgatccgtttctacctgcccctcgaccagcaactggaaaacccctactacgcgcagttggtcatcgtgagcaagggcctggaagagcgcggcgagttgatcgcgcgcctgcaaaagcgcctgcgtgatgacttcgtcggcatcggcagttacgtgcagccgctggaaatgggcccgccggtgggcaggccgattcagtatcgcgtgtcgggcaaagacaccgaccaagtgcgcaaacacgccatcgaactggcgaccttgctggacaagaacactcacctgggcgagatcatctacgactggaacgagccgggcaaagtgctgcgtatcgacatcgcccaggacaaggcgcgccaactggggctgtcgtcggaagacgtggcgcagttaatgaacagcgtggtcagcggatcttcggtgacccaggtgcatgacgatatctacctgatcaatgtggtcggccgtgccgaagacgctgaacgcggtacgccggaaaccctgcagaacctacagatcgtcacgcccaacggcacctcgattccgctgctggccttcgccaccgtgcgctacgagctggagcagccgctggtatggcgtcgcgaccgcaaaccgaccatcaccatcaaggcctcggtgcgcgatgagatccaaccgacggacctggtcaagcagctcaagccggaaatcgacaaattcagcgccggcctgccggtgggctacaaggtcgccaccggcggcaccgtggaagaaagcggcaaggcgcagggtccgattgccagcgtggtgccgttgatgctgttcctgatggcaaccttcctgatgatccagctgcacagcgtgcagaagatgttcctggtggcgagtgtcgctccgctcgggctgattggcgtggtgctggcgttgatccccacgggcacgcccatgggctttgtggcgatccttggcattctggcgttgatcggcatcatcatccgcaactcggtgatcctggtgacgcagattcatgagtacgaggtggccggctatacgccgtgggatgcggtggtggaagccaccgagcaccggcgccggccgatcctgcttacggcagcggcggcgagcctgggcatgatcccgattgcccgtgaagtgttctgggggccgatggcctacgcgatgatcggcgggatcatcatcgcgacgttgttaacacttttgtttttgcctgcgctgtacgtagcttggtacaagatccgggagcccaaaccagagcagagctgaacatgcatcactccctgcgccacggtctgttgatttgcacgctgttgctgtcacccgtggcttttgccagcaccgtattggaaaaccccctgtggcgggtcgaactcgacccggccactctcgccatccgtgtgacgcccaccgggcaggcggcggtgcaagcctccagcggcttgccggcccgtgccgtcagccagcttgtgcagagcgatcaacaggccagttggcagtgggatgacggcgccttccgggtgagcgccagccttgaacagcgcgacctcaagttgaccctgcgcgcacgtgagcctggcgagctgcccatcctccggcaacccgccagcgccctgggcaaagggctgatgtggccattggccgaagggcattacgtgcctgccgacaacgctgtgtggaaaacgtttttgcaggaacaaggtgacctcaacaccacccaggacctcagcctgccgctgtggggcctggaccacgggcgcttcaccttgaactggttgctgaccaacccctacaacaatcgcctgcgctggcaggcagggatggcgctgtccgtggcccacgaattcaccgcgctcgaccctgctgcgccgatgaccctgctgttgcacctgggggaggccgatcccttggccggcgccaagcgctaccgccaatggctggtcgagcaagggcgttatgaaccgctgtcggacaagctgcggcagacgcccgaggcacagaagctgctgggtgccagccatgtctacctgtggggcaatgacctgctggcagcggaggatgtgcgtgactggccgttgttgctcaagcgcctgcgtggccatgagctcaaaggcttgctcgacaaggaatcgacgaaagtcctggcgcaggccacgcccttgaatcgctatgagcagacggcgctgttgcgggggctgaatgcggccatcaaccggaaggccaggcagagttggcaggtagatgagcctgacatgccgcgcctcgctgcacgttatggtgagctgcgcggcgagttggctgtcgcgtttgccggggcgctgagcgatacccctcaaacctggggcagccgggcgatccagtcgctgcgtgactcaggtctttcgcgcttgctgctgaccctgggcgaaggctgggagggcggcctgtggcaccccgaagcgatccgcgccggggtcgatgcgggttacctgatggcgccctacgattcctatgaaactgcgttgtccgccacggaaaatccggattggaccaccgctcacctgggcagcagggcctaccgcgagtgcgcgattgtgctgaaggatggcaagctgaaaaccggcttccagcagtccggccactacactgacccgcgctgcgtgcgccctctgttggaggcccgcgtaaaggctatccaggccaaggctggcttcaacgcgtggttccttgatgcctatgccaccagcatggtgttcgacagctaccgcgacggcgcccggatgacccaggcgcaaaacgccgagggcaatatcgacgcctcgcgctggctcaacaccgtgctcaaattgccagcgggctccgaagacggcaacgccatcaccacccaaggcattctgttcgcccatggcatgcagacgccggtgattggctggggtgaccaggccatgaccaaagacaagcaatcgccctactacgtgggcaattggtacccgccggagcagccgacggtgttcttcaagccggtgccgctcaaagagccgtttcgcacggtctactttgagccgagcatgcgcctgccgttgtaccaggcggtgttccacggctcggtaatcaccacccaccactggctgttcgacagcctgaagctgagcaatgtgcaggctgaaaacgagctgacgcaactgctctacaacgtgccgccgctgtatcacttgaatgcctcgaccgttaagcagcgcctgccgctgatcctgcgtcaggatcggtttttccggccgctgcaccagcgtttggcgacccaggcgatgacggattttcgttggctgacgccggacaggcaggtgcagcaaaccacctttgccgatgggacgcggttggtggcgaattttgctgcgacctcgagagagggctatgccggacgcagtgtgactgcatatggggtgggtgagaaaccgctggtgtatcaggtggagtagggttgcctcagcaggcgtcatcgggggcaagccccctcccacatgttgactgtattcacatatcaaactgtgggagggggcttgcccccgatggcgtccgaccaggcaacgaaaatctaccgcttgcgccacacactcgccaaccagggttgctgcgccctgggcaaccccgccggccggtagtaatgctccaactccacaaacccggcttgcgtcaggagtgattgccacgccgccaggtcgtgataagacccataccgcggcccattccagccttcctggttctcgccccgagggttggaactgaacaatacgccccccgctttcaacgcgccatgcagttgcttgagcacacgcggcaattcctgcttggggatatgaaacagcaccgcattggcgaagaccccgtcaaagcgttgagccggcaggtccagcttgaggaagtcctgctgcaacacctcacagccactgtcctcccgcgccatctgcgcaaagcgctccgagccgtccaggcccacggcgatatgccccatgcgcgtgaaggtctgcaaatcacgccccggtccacagccgaaatccagcagggtaaacggcgccgtaccctggatatgcctcagcaaggcatcgatgttctggctcacatcgtgatcgcgggtgccttcacggaagtcgtcggccactttgttgtagtggccgagggtggtggcggtgatggtgctgaggtcgtcgggcttgagtgtcatgacggggaataccgtgcgtcttcgatggcccgactatacctcacctcttgttaaggacccgcgccaaccgatccccacccaactgaatcaccgccaccagcgccaccagcagcacaatcaccgtcaacatgatctgcgtatcaaagcgctgatacccgtatcggtacgcaatatcccccaagccccccgcgccaatcgcgccggccatggccgatgagttgatcatggtcaccagcgtgatggtgaacccgccgacgatccccggcagcgcttccggcaacagcacgtgccagatgatgtgccagcggcggcagcccatggcttgggcagcttcgatcaggccgtggtcgacctcgcgcaggctcacttcggcaatccgtgcaaagaacggcgtggcggcgatggtcagcggtacgactgcggcccacacgccgtaggtggtgccgacgatcagccgagtgaacgggatcaacgccaccatcaggatcagaaacggaatcgagcggaacagattgacgaacgcccccagcacgcggttaagcgctggcgcctggtagatgccgcctttgtcgctggtgaccaggaacaccgccagcgggattcccaccagcagcgcgatcagcgatgacacgccgaccatcagcaaggtgtcgatggcgccttgtaccaatcgatcaaaccacatagcccagcacctccgtctgttgtgcccaattcccggcccgtttgcgcagttcttcggcgctgtggggcgagccattcaccgccagcagcaattgccccagggcatgcccctggatgcgttccacgccgccttgcaacaggcgcacgcggccgccgagggcgctgaacagggcggccaggtcgggttcgtcggtgtcgccgccggtgaattgcaaacgcagcaccagcgccgcgtcggccgtcgccggtgtggcctgcaggcggctttgcagttcatccggcagcccgtgttgcagcggtgtcagcagggtttggctgacttcatgttgcgggttgccgaacacctgccaaaccgggccttgctcgacgatgcgcccatgttccagcaccaccacgcggtcgcagatctcgcggatcaccgccatctcgtgggtgatcagcacgatggtcaaacccaggcgccggttgatctcgcgcagcaggccgaggatcgattgagtcgtctccgggtcgagggccgaggtggcctcgtcacacaacaggatctcggggtcgtgcaccagcgagcgggcaatgcccacccgttgtttctgcccgccggaaagctgcgccggataagacttgtgcttgtcctgcagccccaccagttccagcagctcacgcaccttttgctcgcgctgctgcttcggtacgcccgccactttcaacggcaactcgacgttctgccacaccgtcttggccgacatcaggttgaagtgttggaaaatcatgccgatgcgccgacgcagggccaccaggcggtcttcgtcgaagtcgccgatgtccacctgatcgatcagcacccgcccgctgctgggttgttccaggcgattgatggtgcggatcagcgacgacttgccggcgccgctgcgaccgatgatgccgaacacttcaccgcgctggatcgccaggtcgatgccttgtaacgcatgcaccgtgccgtcgtaggtcttgcccaagttgataaaacgcacatgggcgcgattgagctcggggtgcagttcggtctgttcggcgtccctgggcggcaggcccaggtcgcgcagtggggcatgggcggcggtcattttttatcttcccagccgacttggtagagcttgccgagggacttatccaaggcggcacgcaccaccggcgaatgctggtagatatccacaaacttgatcacccgtgggtcggtcttgcttttgggttggatcacgaactggatcacgtactccggatggtcgaggccgtcgaacagcagcgccgactcggcatcgaaggtcttggacaggcggatatacgccgggtagccctgcaccaggtcggcatcgtcataggcgcgcaccagttgcaccgcttcgacctgcaggatcttgatcttcttcgggttggaaacgatgtcctcttcggtggccttgtagcccacgcccggcttgagcgtgatcagccccgccttggccagcagttgcaggccccgaccgctgttgatcgggtcgttggcaattgccacgctggcgccctggggcaggtcgttgatgctcttgtacttctttgagtacagcccgacgttgttgatgatgcccggcgcataaggcaccaggtcaaaaccggcggcggccttggcgttttccaggaacgggatgtgctggaagtagttcacgtcgatatcgccagcagccaggctgacgttgggtgcgatccagtcggtgaactccaccagctcgactttcaggccttgcttgccggcttcggccacggcggcttccagaggaatcgcaaaggcggcggtggtgccgattttcagcggtgcatcggcggcgaataccgccgagctgaacagtccgaacgccagggccagtgctttgactggatgggtgagcagtgtctttttcattgggtatttccagtcagagaagcagtttgtcggtaggtggaaccggtgtgttgttcgggtaggcgggcgctgccctggaagactttttcccgcagcgttccctgttcgtattcagttttgtacgacccgcgcttttgcaactccggcaccaccaggtcaatgaagtccacgtagctttccggcgtaacgatgcgcgtgaggttgaagccatccaggccggtttcgccgatccaggattccagctcatcggcgacctgtccgggcgagccgaccagggtgatgtagcgcccgcccagggcgtgctgctccagcaatttgcgtcgggtccagtcgttgttctgcaggttcttggtggctgactggatcgcgttgctcttcacgtattggatcggttcgtccagtgcgtattgggcaaagtcgatagcggtggatgcggaaaaatgcgccacgccagcctccgcgctggcgtagctcaagtattccgcgtgcttttcccaggcaagttcttcggtggcgcccacgatcacgttgaggcccatgaacaccttgatgtcatccgggttgcgcccggccgcgaccgcgctggcgcgcaccttgtccacctggaccttggtcgccgccttgttctgcccgctgatgaacacgcactcggcatgccgcccggcgaacagcaaaccgcgctccgaactgccggcctggaacagcaccggtgtacgctgcggcgagggttcgcacaggtgataaccctccacctggtagaactcgccctggtgcgcgactttgtgcaccttgcccggctgcgcgtacacccgcgccttgggatcgttgagcaccgcgccgtcttcccagctgccttcccagagtttgtagagcacctccaggtattcatcggcctggtcgtagcggcggtcatgctcgacttgttcagtgaggcccatggccttggcggcgctgtcgaggtagccggtgacgatgttccagcccacacggccacggctcaggtggtccagcgtggacatgcggcgggcgaacaggtacggcggctcgtaggtgaggttggcggtgaggccgaagccgaggtttctggtgacagcagccatggctgagaccaacagcaacggatcattcaccggcagctggatcgactctttgagcggcacatcaatcgagttctggtacacgtcgtacacaccgacgatatcggcgatgaacaaaccgtcgaacagcccgcgttcgagggtttgcgccagctcggtccagtactcgatcgtcttgtactgggtcgaagtgtcccgtggatgcgtccacaggccgtggttgatatgcccgatgcagttcatgttgaaggcattgagcaggatttttttcttcgccatcaaatggtcccccgcagtggcgggttttcatcgttcaggtagtaattacccaccgcgtggtacttccagcgcaccgggtcgtgcagggtgtgcacgcgggcgttgcgccagtgacggtccaagccatgttcagccagggtcgcctggctgccggccagttcgaacagggtgctgccggcggccagggaaatttcggtgctcaaggcgcgcacttccgcgaccgcaatcgaggcggcagcgacggtctcggtgttgctgtcggcctgggcgcggtccaggtattcgcctgagcgctccagcagcgcctcggcggcgtgcaggcggatgctcaggtggccgaagcttttcagggtcagtgggtcttcggtggccttgtcgttgccggcgtcgatccacgggcgggtcttggtgcgcacaaagtgcagcgcatcttcaaaggccgcgcgggcgataccggtgtcgatggcggcatgaaggatctgcgccagcgggccgacggtggtcgggcgttcgaaggcgctctggaacgggatcacgtcctgcgcggctacccacacattgtcgaacaccaccgaaccgctgccggtggtgcgctggccgaagccgctccagtcgtcgatcacgctcaggccttcactgtcacgcggcacaaaggccagttgctgtacgccgtgttcatccaccaccgaggtgggaatgcgctgggcgtagatcgcgccggtggaatagaacttgcggccgctgatgcgaaaaccgtcaccgtcgcgggtgattttagtgacgcggtcatgggccgtcttggtgcccagttccgccagggcgttgccgaagcgctggccggcaagtacctcggcgtacaggcgtttttgctgcgccgggctgccgtttacgcgcagcacttccagggcgtagaaatggttctgcgggatctgccccagggacgcatcggcctgggctatcaaggcaatcaccttggccagggtgacgttggacacgcccgcgccaccgtactccttgggtacgctgatgccccacaggccggagcgtgaaaacacgtccagttcgggcagcggcaggcggcgttcgcgatcgcgctgggcgctgtcgcggcgaaagtcttcggccagatcactggcgacaacaagggcttgttcgtcgctggtgatgaccgcgacgtttgcagagaaagtcataggtgttctccagaggtctggtcggtcagatccaggaatggcgagctggcaaggtgccgttcaatcgataggcgccgacggcgtgatacttccagcgcaccgggtcgtgcagggtgtgcacccgggcattgcgccagtggcggtcgaggttgaattcggcgagggtggcgcggctgccggccagttcgaagagtttctcgctgaccagcagcgacacttcggtggtcagcaccttggcctcggccacggcgatggaggcacgcgcggcggattgcgcggtgatcggtgcggcgctgacctggtccagcacttgtcccgccttgcgcagcagggcttcggcggcgtgcagttcgatcttgagcttgccgatgtcggcgatcacatacaggtcgtcactggcgcgttcgaccttggcgtcgatccaggggcgcgagcgttcgcgtacgaaggcgatggtgtcatccagcgcaccacgggcgataccggcgtcgatggccgcctggatcacttgcgagacggcgccctggatatttggtgtctcgccgatgcgccagttttctaccaccagctcggcctccaccggcacctgatccagcagcaccgtgccgctagcggtggtgcgctggccgaagccggaccaatcgtcaacgatgcgcagcccttcggtaccacggcgcacaaatgccatgacctgcttgccgtcatcgttcaacgccttgaccgccacccaatgggcaaacagtgcgccggtggaatagaacttttggccgctgattacgtaaccgtcacccttggcggtgatgcgcgccttgagctccagagtgtttttggtgccgcgttccgggccgccattgccgatgcgccagccgtcgagcacgctctggaacagctgttttttctggcgctcggtggcggcgccctgcaacaggtgcaggatgccgaagtggttctgcgggatctgcccgagtgccgggtcggccgcgctgatgattgcgaacacctcggccagggtcacgaaagacacctgcgggccgccgtactcacggggaatggaaatactgccgagcccactgcgggtgaactgctcgatctgcgcccacggcagtttgcgttgctggtcgcgcctggcggcttgcaggcgcgccgcctgggccaactcatgggcagccttcagcgcctctgcatcgttgcgcagcacggtggccggcaacagcaggggggcgacgtccagatcattctgggggggtgttagagccaagttagacatcagcgccgctccttggctgcacgtaatgccctggcgttgcgcaccggggtaattctgaccataccgacctcgcattcaatgaaataaaaacagaaaaatcagagatgtccggtggtccggtgcatataccctaagcgtgttaaatatttaaataaactaacttttgggaatatgcatagaaggtctgtcacccaggttcgcagggagagcccagagttcgtggctggtaaatcagcgcgctccccgccgggcgggacggtgctcctgctgcgatgcgcaaggtgcgcgcgggtgcccagagtgaattgttgccgacacgatcgagaatgcagtacgtcacctccagccggcagtcgtcaccgccttcgagaatcaccgtcgaaggcacccagacctgcacggcctggccgacttcccgggcctggaccttgggcaggtccaggcgcacatcgccccagcgcaaggtgatggcgtcgccgctggccatgttcaggtacggctcgatggtcaggggaatgccgcgtcgcccctgcccggcgttgacgccgtagcggcggatggtgtcgggcaggcccacgggggcgaggttctggttctcatcgaggtacaggggcgacggctggccgcccgggtagagggtcttgacgcggactcgggtcaccgctgagcgagccggagcatgaccgacctgcatgacctggtaatgcacacgagccgggccatcgaacacgaaactttccggtactcgcaggtgagtgaccgcgccaatcctgccggcggtgacccggcgtgaagcggcgaagcagttgttccagaacagttcgatcaggtcgccttcatccatgccgggatacgcagcgatgtcgacctgcaagtgggtggcggccaaggcattgatgccattgccgatggcctggggcagtgtcggggcagtgagcagggggcgtgtcataagtcatctccttgatgcagccagcagccatcgttccggccctttggcgtgggtgcacgcggtgggccgaaaagaacgattcagtgaatagccgggataggatccaatcctctgggcgctagataagagggttggccgagggccgtcaatggcggcaaagggctaaatggcgggtttggagatattcagaacggtccgactgaggcggggatattcaggtaggtgcgctggggtgttttacccgcgggaacgacgatcccttgtaggagcgagcttgctcctacaaagggtatcagtgggcgaggaatttgctcaggaactgcttggtgcgctcttccctggggttggcgaacaacgccttggcttcaccttgttcgacgatcaggcccttgtcgaagaagatcacccggttggccacatcccgcgcaaaactcatctcgtgggtgacgatgaccatggtgcggttttcttcggcgaggctgcggatggtcgccagcacttcaccgaccagttccgggtccagcgccgaggtgggttcgtcgaacaggatcacctccggctccatggccagcgcacgggcaatcgccacgcgctgctgctggccgccggacaggcgccgtgggtaggcgtcttccttgcctgccaggccgactctggccagcaacttgcgccccaaagcgatagcctcttcgcgtggcatcttcttgaccacggtggggccttcgatgacgttttccagcgcggtgcggtgggggaacaggttgaagttctggaacacaaaacccacgtgctggcgcaggcgccgcaccaggctttgttgctggttgatcggcttgctggtgtcgatctcgatgtcacccaccttgatgcggccgctggtgggttgttcgaggaagttcaggcagcgcaggaaggtggtcttgccggaaccgctggggccgatgatggcgatgacttcgccttccttgacctccaggtcgatgccgttgagcaccacctgacccttgaattgtttggtcagtttttcaaccacgatcatgcttcaggactccaggtcatgccggttgacccggtcttccaggcggttttgcaaatgcgccaggatgctcgccaaaatccagtagatcagcgcagcggagagatacatggtgaagatttcgaaggtccgtgccgacaccagttgcgcctggcggaacagctcgggcacctggatagtggcggccagcgccgtgtccttgaccagcgaaatgaagctgttgcccagcggcggcaaggccgtgcgcatcgcctgcggcaggatggcccggcgcagggtctgcgcgcgggtcatgccgatactggcggcggcttcccattggccgcgctcgatggaaccgatggcggcgcgcaggatttcacaggcgtaggcggccatgttgagcgagaagccgatcatggcggccgggatcggatccagctcgatgcccacttgcggcaagccgtagtagatcaagaacagctgtaccagcaagggcgtgccgcgaaagaacgacacatagactcgggcgagccagctcaccagcttgaagcgcgacaggcgcatcaaggccaggccgaagcccagcagcaagccgaaaaacatcccgccgaggctgaggatcaccgtgtaatacgcgcccttgagcagaaagggcgcggagtccagcgcgagttggaaacctgcttccattattgagtgacgtcagcgttgaagtacttctcggacagcttcttcaaggtgccgtcggcgcgcagtttgtcgagcgccttgttcactgcatccagcagttctggctcacccttgcgcagggcgataccggcttcctggcgggagaaggcgtcgccggcagcagcggtgtccggggctttcttggcgtattccagggcggccaggcggtcgatcaggatggcgtcgatacggccgatgcgcaggtcctggaacttggtcgggtcgtcgttgtaggtcttgatgatggctttgggttgattgtccttgagccattgttcgtagttggtgcccaggcccacaccgactttcttgccggccaggtcgtcggcggtcttgatggtgtcgacgtttttcttcaggaccagcgcctggataccggagacggtgtaaggcttggagaagtcgtatttctttttacgctcatcggagatggtcacctggttgaccacggcgtccaggcgcttggattccagggcggcgaggatgccgtcccacggagtcgcttgcagcttgaccttcacgcccagctctttagccagtgcttcggacagctccacttcgaaaccgctgagcttgccgctttcatcgacgaagctgaacggcgggtaggtaccttccaggccgatcttgatctcgccggctttcttgatgttgtccagctgatcacccgcgactgcttggccgatcaggccagccccgagtgccaggcccaaagtgccaaccagcaacgtgcgacggaatacagaaatagtcatgaagagcccctgtgtttttatggtgtgcgaagcaggtgacgcagtagtcgtatcctgccttaaagcgcgtagcgcgtcttcgcctacggcgcgactataaagccggtttttaagacttgaaaataatataaataaaatctgatattccaatattgaatatcaagagattctaatgtgggaggggggcttgcccccgatagcggtgtatcagccacagaagtcatgactgatactctgtcatcgggggcaagccccctcccacatttagtccgcgtttattcagttgaaggcactgttgtaggcaaacaacgccggcgccccgccggtatgcaggaaaatgatcgggccatcctcgaagcgctggcgcccgataccgtccagcaagccggccatggccttgccagtgtagaccgggtccagcagcaggccttcctggctcgccagtaacttgaccgcagacagggtgccggcgttcggttcgccatagtgcgggccgaaatattcgtcccacaggatcaccttgaaggcctcgggcatatccacacccagcaattcggcggtgcgttcggccaggccctgcactttcgggaactgggcttcttcggtgcgcgatacggtgataccgatcacgggcaactgcggcagcacttcactcaacgccagggccaggccgctgtgggtacccgcgctgccggacgccagcaccacggcggcaaactcgatgccgctgtcttcgatctgcgcggccagctccaggccggcgcgcacatagcccaacgcaccgagggcgttggagccgccgataggcaccaggtacggctgcttgccgttgctgcgcaggcggtcggcgagggcgttgagctggtcgtcgacgttgtcgaggttctctaccagctccaccttggcgtcgaacaggtccagcagcaggcggttgccgttgcccaggtagttggggtcatcggtgccggtggggttctccagcagcgcgacgcagcccaggccgagcttggcggccagcgcggcggtctggcgcacgtggttggactggatcgcaccagcggtcaccagggtgtcggcgccttgggcgatggcatcggcggccaggtattcgagtttacgcagcttgttgccacccatggccagcggtgtggtgtcgtcgcgcttgacgtagatgtctctgcccaaccaggccgacagccgctcgagtttttccagggcggtggcgccacccagcagttccaggcggttaaaacggtcgagctgttgtttgatcatggctacgcacggttgatgaggatggggcgactataggcaggcacttttcatcgggcaaccgccaatcgcttattccggatggttcttagtattgcaccattggttcttaagggcggccagggtgcataccgtaaagtgagcgccattacgtcaggagtgaaaaccgtgagtgagcgttccagtcattggcaattacagaccatcgtcagccagttgcgcggcgcccgggaccagtggcgcacgcgcaatggtcgcttgagcggtgagcatggtggccgcgagttaccttctcgcgaggcggtggcgcagattctggagtcgctgtgcggtgcgttgtttccgatgcgcctggggccggtggacctgcgtgaagaaagcgaagatttctacgtcggccacaccctggatgtggcgctcaatgccctgctcggccaggcgcgcctggaactgcgctacgccgcgcgccagagcggcgaggacgacagcgccgttaacgcccacgccatccgcttgatccaggatttcgccctggccttgccgtccctgcgcagcctgttggacaccgacgtgctggccgcctaccacggcgacccggcggcgcgtagcgtggatgaagtgctgctgtgctaccccggcatcctggcggtgattcaccatcgcctggcccaccacctgtaccgcgccggtctgccgttgttggcgcgcatcagtgccgagatcgcgcactcggccaccgggatcgacatccaccccggcgcgcagatcggcccgagtttctttatcgaccatgggaccggtgtggtcatcggcgaaaccgcgatcatcggcgagcgcgtgcgcatctaccaggccgtgaccctgggcgccaagcgcttcccggcggacgaggacgggcagttgcagaagggccatccgcgtcacccgattgtcgaggacgatgtggtgatctacgccggggcgacgatcctggggcgcatcaccatcggcaagggctcgaccattgggggtaacgtatggctgacccgcagcgtgccggcgggagcgaatatcacccaggcgaatttgcagcatgaagatggtgcgcagaagtaagcagcatgcttaccgaatgtgggagggggcaagccccctcccacattttgtgtgcatttcacctccagactgctgaacgatttcctcttctcgcccgtcataccaatccttgagctagtgtaggaatcacctaccactcagccctgcgattagtcccagaccgcctatccatgtttaacttgaatgttcgttcaagttaaacccggtggttcgctgcccgctcacaacaggaggcttacctttgctgagtccgttattgacagccacatccctcaccctcggggtgcatcgttcatgagtgcatcgtccaccccatccagcggcctggtgcgcatgaatgcgccggtcttctactttgccgcgacgtttatcctgctgttcggcatcaccgtcatcgctatcccgcaacaggccggtgcctggctgctggcggcgcaaaactgggcggccaacacggtcggctggtactacatgctggcgatgaccctgtatctggtcttcgtggtggtcaccgcgctatcgggctacggcaagataaaactcggtgccgaccacgacgagcccgaattcagttacctgtcctgggccggcatgctgttcgccgccgggatcagcatcacgctgttcttcttctgcgtctccgagccgctgacgcacttggtgcaaccgccgcaaggcgcgccgatgaacgccgacgccgcacgccaggccatgcagattctgtttttgcactggggcctgcatggctggggcgtgttcgcctttgtcggcatggccctggcgtacttcgcctaccggcataacctgccgctggcgttgcgctcggcgttgtacccgctgatcggcaaacgcatcaatggccccatcggttacgcggtggatggcttcggcatcatcgccacggtgttcggcctgggcgcggacatgggttttggggtgctgcaccttaactcagggctggattacctgttcggcattgcccatacccagtggattcaggttggcctcatcaccctgatgatgggcgctgcgatcctggtcgccgtggccggcgtcgacaagggcgtgcgggtgatgtccgacatcaacatgctgctggcctgtgcgctgctgctgttcgtgttgttcgccggccccacccagcatttgctcaacaccctgatccagaacatcggtgactacctgggagccttgccgaccaagagtttcgacgtgtatgcctacgacaaacccagcgactggctgggcggctggaccgtgttctactgggcctggtggattgcatggtcgccgttcgtgggcctgttcatcgcgcgtatttcccgtggccgtaccatccgcgaattcgtgttcggcgtgttgctgatcccgctgggtttcaccctggcgtggatgtcgatcttcggcaacagcgccatcgaccaggtgctcaaccacggcatggccgcactcggccaatcggccatcgatgacccgtcgatgagcctctacctgctgctggaaacctacccgtggagcaagaccgttatcgcggtcacggtgtttatcagcttcgtgttcttcgtcacctcggccgactccggcaccgtggtgctgtcgaccctctcgtccaagggcggcaacgccgatgaagacgggccgaaatggctgcgggtgttctggggcgcgatgaccgcgctggtcaccagtgccttgctgttcgccggcagcatcgactcgctcaagtcagcggtggtgctgacctcgctgccgttctcgatgatcctgctgctgatgatgtgggggctgcacaaggcgttctacctcgaatcgcagaagcagatcgcccagttgcactcgctggcgccggtttcggcagcgcgcaaaggccggggcggctggcgtcagcggttgagccaggcggtgcatttcccgtcgcgggatgaggtgtatcgcttcctggaatcaaccgtgcgcccggcgattgaagaggtgacggcggtgttcgtcgagaagggcctgagtgtggtcacccagcccgacccgtccaacgacagcgtcagcctggaaatcggccatggcgagcaacatcccttcgtctatcaagtgcagatgcgcggctacttcacgccgtcgtttgcccgtggtggcatgggctccaaagagatcaacaaccgtcgctactaccgggcggaagtgcacttggccgagggcagtcaggactatgacctggtcggctataccaaggagcagatcatcaacgacatcctcgaccaatacgagcgacacttgcagttcctgcacttggtgcgttgacgctcaacgcagacctgtcagagaagctttatgtgggagggggcttgcccccgatagcggagtgtcagtatccgatgagctggctggcataccgcaatcgggggcaagccccctcccacaaaagtatgtgcaaggccctgaattttcgggttttcttaaatttaatttcatccgtcgcccgcctgttttgacgcgcaactgtcatctggccactgcgtaattgtgtgaagcgtttgacgctttcatttcagaacagtgacggagaccggtaccaatgaagacgttgataagccctatggtgggtgccgccatggcgagctttatgctgtccgcccatgccgattttatcgatgacagccacgccgatgtgaccctgctcaaccgctacctcaaccagcaggggcgtgacgtggtgaacagcaacgccaaggcccacagcattcgcgattggggccaggggtttgagttcaacttcaagtccggctacaccgaaggcccggtggggtttggcctggacctgcaggcgttctacgggttgaagctagactccggtggcgatctcaacgacaaggatcaccagggccgctaccccggcagcatgttcccgctggacaacggcaagtccgccgaccagttcggcgtgttgagcccgacgttcaagatgcgtttcgccaaggacgagttgcgcctgggtacgctctacggcaacaacccggtgctggccaacaccgacgggcgcctgtaccagcagaccaataccggtgtgcaactggtgtccaaggacctcagtgatttcaccttcaccggtggcgatatcttcaagaccaagatccgcaacgaaaccggcgaccagggcatgattaccgccggtggcaccaaagagagcgatcgtttcctgttcggcggtgcggactacaccggcatccagaacaccacggtcagcctgtggtactccaaccttgaggattactaccagcagttcttccttggcgccaagcgccatgatgccttgtcggtgggcgctatcgacaccgatgtgcgggtgttccgcagcctgggcgtgggcggcaacgccgatggcgacaaggacttcgcggcggccggcctctacggtgacggcactggcaagggtcgcatcaaccagaccaccgccagcctgcttgagagctacagcctggacgggcataccgttggcctgggcatccagaaaaacagcggcgacagcgactttccgtacctggattccggcctgaacagcggtgacaaccgccaaggcccaggctcaggcgccgacaccccggcgctgaccaatatgcagttgaataaatttcaacacgccggtgagcgtacttggcttgcgcagtacaagtatgacttcggtaagctgggcctcacgggcctgacgttctcggcggcctacgcccacggtgatgacatccgcaccgtgcagggcaccaccagcgagtgggagcgcaacattgccgtggcttaccaagtaccgaccggcacccttaaaggcctgggcgtgacctggaaaaatgcgcacgccagcccggatatcaccggtgccaccgtgcaggatgaaaaccgcttctatgtgagttatgtcgttcccctctggtaggcaattgctgtagaacggaacggcagacttaagcgattcagctgcttaaaaggcctgggaatagcgttattcccgggccttatttgtcccaagttcaagagaggattcgatgacttacattgctgccgaaaaccgctatgaatctattccgtatcgccgcgtaggccgcagtggactggtgctgcccgcactgtccctggggctgtggcacaactttggcgacagcaccccgatcgacacccagcgcgccctgctgcgcaccgcgttcgacctgggcatcaaccacttcgacctggccaacaactacggcccgccctacggcagcgccgagatcaacttcggccgtttgctgcgcgaagacttcaagcactaccgcgatgaactgatcatctccagcaaagccggctgggatatgtggcccggtccatacggccagggcggcggctcacgcaagtacgtgctggccagcctcgaccagagcctgcaacgcctgggtgtcgactatgtggatatcttctactcccaccgttttgacgccgacacccccctggaagaaaccgccagtgcactcgctactgcagtgcaacaaggtaaggcgttgtatatcggtatctcgtcctactcgggggtaaaaacccgcgaaatcgccgccctgctcaaagagtggaaagtgccgctgttgatccatcagccggcctacaacctgctcaaccgctgggtggaaaaagacctactggacaccaccgaagaactcggtgccggggtgattgccttcacgccgctggcccaggggttgctgaccgacaagtacctcaacggcgtaccggcggatgcgcgggtcaaccgtccgggtggtggttcgttgcaggccaagcacttgtccgaagccaacatcgcccacgtgcgtgcgctgaatgaaatcgcccagcggcgtggccagagcctcgcgcaactggccttggcctggacgttgcgtgacccacgggtgaccagtgcgctgatcggtgcgagccggccggagcagattatcgagaacgttggtgcgttgaagaacttgagcttcagcgcggaagaactggcggagattgatcggtttgcgcaggaaggcgggatcaacttgtgggaaaagccatccactgctgaataactggtcattacttggccattgtgggagggggcttgcccccgatgggggtgggtcaatcactgattagttggccgacaatctgctatcgggggcaagccccctcccacactttgattttcagtgttgctgagatcgtgtgggcctagaacggcacatcccccaaaatcgtcgcccggtgcatcacccgccgctgcggccggtaatcatccaccgcgtagtgctgcgtcacgcggttatcccagaacgccacatcgttttcctgccagcgccagcgaatggtgaactccgggcgtgtcgcgtgggcgaacaagagcttcaagatcgcctcgctctccgccggttcaagctcgttgatcttggtggtaaatccatcactcacgaacagcgactcgcgcccacttaccggatgcgtacgcaccaccgggtgcgataacggcgggttcttcctgcgggtttcttcccagcgtgccaggtcttcggcggtgttgccaaagcgctccagcgggaaggacttggtgaagtcatgggtcgccgtcagcccgtcgagcaagcgcttgaacggtgcggacaacgcttcataggccgcaatcccgctggcccacagcgtatcgccaccaaacgccggcagcagcttggcgctgagcaccacgccgagcgccggtgtcggcaggaaggtcacgtcggtgtgccacacggcgttgtcgcgcacgtcggtgacggcggtgtcgaggatcagcacttcgggctggtccggcacgttggggtagatcgggtgaatatgcaggtcaccgaaatgcgccgcgaaccgtgcttgctgttggggggtgattggttgatcacggaagaacagcaccgagtgctggagcaacgcctgttcgatggcatcgcgctcttcaatgttcaacggctgggtgatatcgacgccactgatcagggcacccaatgcggtgctaatgggggtaacggtcaggctgctcatgctgttctcactcaatgtgcctggccatgccacggcaccagtttacgctgcagggcacgcaggcccatttccatggcgaaggcgatcagggcgatcactagaatccccagcaccaccacatcggtgaccaggaactgcgccgccgactgcaccatgaagcccaggccgctggtggccgcgatcaattctgcggcgaccaatgtcgaccaacccacacccagcccgatgcgcacgccggtgaggatgtcgggcagtgcgctcggcaggatcacatgccgaatcaactgggcacgggtggcgcccaacgactgcgccgcccgcagtttggccgggtcgacggtgcgcacgccggtggcggtggcgatggcaatcggcgcaaaaatcgccaggtagatcagcagcaccttggacagctcgccgatgccgcaccagatcacgatcagcggcaggtaggccagcggcgggatcggccggtaaaactcgatcagcgggtcgaggatgccacgggcgattcggttggaaccgatggcgatccccaccggcacggcggtcagcacggcaaagcccaggcccaggccgatacggctgaggctcgcgcccaggtgctgccacaaggtggaatccatatagccgctggtcgccagcagccagcccttttgcagcacggcggacggcggtggcaggaacagcggctcgatcaagccgctggccgtcacggcccaccagagggctagcaacgcgaccagggtcagcaggctgatccagcgcgtgctcaggctgcggcgtaccgggaccactgcgtgcgccaccggtttggtcaccgtggcgggaagttcgtagctgctcatgcggacacctggcgttgagagaacactttgcccagcacgtgttcgcgggtttcgataaagcgtgggtcggacttgatcgcccgcgccgattcaccggcggcgtagcgttggccgaagtccaagtgcaggcgttcgacgatctggccggggttgggcgccaacaggatcaggtcggtggcgaggaacaccgcttcttcgatgtcgtgggtaatcaggaataccggcttggccgtgcgccgccagacctgcagcagcaattcctgcatctgttcgcgggtgaaggcatcaagggcgccgaagggctcgtccatcagcagcacacgagggtcggccgccagggcgcgggccagcccgacgcgttgcttctggccgccggaaagctgccagatacggcggctgtcgaaaccggcgaggtccaccagcgcgagcatttcccgggcgcggacttcgcgttgcgccttgggcacgccagccagctccaggccgaagccgacattggccagcacgtcttgccaaggcagcagggcgtcgtcctggaacaccacgccgcgttcagcactggggcctttgaccggcacgccatcgagggtgatgcgcccggcgcaaggttcgacgaaaccggcaatcaggttcaacagcgaagtcttgccactgccggacgggccgagagccaccagcaactgctggggccccaggtcgagtgaaatatctgacagtaccggttctgtggcgcctgggtactgtgcgctgatgcgctccagctgtagcaaggccatcgcgatgaactcccgatcaattggtgatgaatttggcgctgacgtaaggggtgtagtccggcagtaccgcgtcgaccttgccttgttccttgaggaacgcggcggtgtcggtcacggctttggtggtcggtgcgcccagcaggctcacctggtcagcggccagcgggtagacgttgccttgcagcaaaagcggaatatcgctggccttggcaccggagagtttcaccagtttgttgacgttgcttttatcggcgagccaggcttgtgggtctttgcggtaggcggcgtaggcatccagggtgaccttggcgaacgcggtgacgatttccgggtgcttctcggcgaagtccttgcgcacgatccaggcatcgaaggttggtgcgccgaacttggccaactcgccggaggtgatcagcaccttgccgttctctttggcgacgcccagtgctgggtcccatacgtaggtggcgtcgatgtcaccacgcttccaggcggcgatgatggccggtggcgcgaggttgaggatggtcactttggacgggtcgatgttccagtgcttcagggcggccagcaggctgtagtgcccggtggacacgaagggcacagcgactttcttgccgaccaggtcctgcgggctgttgatacccgaaccgttgcgcgccaccagggcttcggcgccgccgatctgggtggccaccaggaaggtttccaccggtactttgcgggtgatcgcggcggtcagcgggctggaaccgaggtagccgatctgcacgtcacctgaagcgatggcggcgatgatgtcggcgccattgtcgaatttgcgccagttgatcttcgcgttagtggctttttcataggcgccatcggcttgggcgactttggccgggtccacggtggtctggtaagcgatggtcacgtccgccgcctgggcaaacaggctggcaccggccagggacaatgcggccagcaggcgcaaaggggttaacagtttcaaggggaagctcctcaatcaggcggccgagggtcggcgtgtgaggagactaaatgatctaagaatccgaaaataaataacattttcgaattagcttatgagaagagttgtgagcgctgaccttcaatcgggtggaagtcaaatgtgggagggggcttgcccccgatagcagcgtgtcagccactgtataggtagctgacccacgccatcgggggcaagccccctcccacatttgccccgatttcagcttacttagttgctgatggcgaggatgctggcttggtacgagccgacaaacacgtcaaagtcgcccacttcgttttgctccagctcggcttgctgtgccagtgaggcacgcgcgagttcttcaaaacgcgcctgctcttcagccgccagcggctccttgcggaaatgctcggcgtgcagctggctctgatgcagggagaattgcgcaaagctctctttacgctcggccatcgccgccagcacctgggccgacggggtcagggacgaatcgttgaccttggccaactgggcgtccagcgcctggctgtgctcggtgatgccgtggctctcatccagcaaggcagccagtggcgcaatctgttcgagcagctcggcggcccattccttcatgtccaccggctggccctggcgttgcagttgcaggcccggacggcgaccttccttgaccacgctgaggaagttggaggtggcgttgccgcactcgttgttggcgaacagcgggctgtcgttcagtgcgcagaacagcaggaaggcgtcgaggaagcgcgactcttgcaagtcgatacccatgggcaggaacgggttgatatccaggcagcgtacttcgatgtactggatgccacgggccatcagcgcctggatcggccgctcgccggtgtaggtcacgcgcttggggcggatgttggagtagtactcgttttcgatctgcaggatgttggtgttgagctgtacccactcaccatccttgtgcgtgccgatttcgacgtagggcgcgtagggcgttgccaccgcttcgcgcaggctgtcggtgtagctggccaggtcgttgtagcacggcgtgaggccggcctgggcattgctctggtaacccaggtcactcatgcgcaggctggtggcgtagggcaggtacagggtatcggcgtcgagcgcttccaactggtgcgaacgaccacgcaggaacccggcgtccagggccggcgaagcaccgaacaggtacatcaacagccagctgtagcggcggaaattgcggatcagcgcgatataggcgttggactggtagtcgcggtcagtgccgacaaacccttcggtttccttgagcaacggccacagcgcctcgggcaacgagaagttgtagtggatcccggcgatgcactgcatggtcttgccgtaacgcagggccaggcctttgcgatacacgtacttgagctgtccgatattggaggtgccgtagtaggcaatcgggatgtcttcctcggccggcaacgggcacggcatcgaggggctccacaggtattcgctgccgagcttggtgtaggcaaagcgatggatcttgtccaggctgctcagggtatcggccgggttgggcagggcaggagtgatgaactccagcagcgattccgagtagtcggtggtgatctgttcgtgggtcaacgcagcgcccagggcttcggggtgcggcgtttgcgccagtcgaccctcaccggtgacacgcaggcattcgcgctcgatgccgtgcaagcactgctctagcagggagaggtgttcgcgcttgccgagcagggccaggcggcggttgagaagttcgctcaagttggattccttcacgcgtcagtcgccccaatatgggggtgggcaggacggtctacaagggtgaagttgaaactggcgtgatcgcctggttttgagtcgatttgacccgctctgaatatgccgacttcactccatgaatttggctacagcgcagcgagaaaattccgacgccgttagtgcagcgccgaaattaactcaaatcgggggtggggagctataggacagcgaaggtgccctgtgcttttgcgacaagtctttcgtcctgatacacctccgcctcgaccaccagcgtacggcggccggcatgaatcacccggctggtacacagcacgtcaccgtccgacacggcgcggatgtaattgatcttgcactcgatggtcgcgctctgctggtcgaaaccatgggagctggagcaggccagtcccatcgtaatgtccaccaggctgaaaatcgccccaccatggagcttgcccgcgcggttgcgcagttgcggctccagggtcagggccacctcggcaacgccttcttcaaggcgttgcaggcggcagccgatcagttcgctgaaggcgctctgggtcaagccggccgggatttccatcaacgtttcttcagctgtttggcgttggcgaacagcgaagccatggcgttgttgcttggcgctgtggtggcggtttccttgcgcggtgcattgttttcagagcgattctgcgactggcgcggtgccgagcctgggcgtgcgccacgggcaccgtcgattttctcccctggggtgtcgctcatgcgcatcgacaggccgacgcgtttgcgcgggatgtcgacttccatgaccttgaccttgaccacgtcaccggctttgaccgcttcgcggggatccttgatgaatttctccgaaagcgcggagatgtgcaccaaaccgtcctgatgcacgccgatgtccacaaaggcgccgaagttggtcacgttagtcaccacgccttcgaggatcatgcccggttgcaggtccttgaggtcttcgacaccgtcctggaactcggcggtcttgaactcgggacgtgggtcgcggcccggtttttccagctcttgcaggatgtcggtgatggtcggtacgccgaaggtttcgtcggtgtacttcttgggatccaggcgcttgaggaaagcggcgtcgccgatcagcgaacggatatcgcggtcggtctcggcagcgatgcgttgcaccagcgggtaggcttccgggtggaccgcagacgcatcaagcgggttgtcgccattcatgacgcgcaggaagccggcggcctgttcgaaggttttttcacccaggcgtgcgacttttttcagcgcggcgcgggttttgaacgcgccgttttcgtcacggtgactgacgatgttctgcgccagggtggcattgaggccggagattcgcgccagcagtgccacggaggcagtgttcacgtccacgcccacggcgtttacgcagtcttccaccaccgcatccaggccgcgcgccagtttcagctgcgacacgtcgtgctggtactggccgacaccgatggatttagggtcgattttcaccagctcggccaacgggtcctgcagtcgacgggcgatggataccgcgccacggatcgacacgtcgaggtccgggaattccttggacgccagttccgacgccgagtacaccgaagcgccggcttcggaaaccatgaccttggtcatcttcatggctgggtattttttgatcagttcggcggccagcttgtcggtttcgcggctggcggtgccgttgccgatggcgatcaggtccaccgcgtgcttggcgcacagggcggccaggatcgccagggtctggtcccacttgttgtgcggcacatgcggatacaccgtggcgtggtccagcagtttgccggtggcgtcgaccacggcgaccttgcagccggtacgcaggcccgggtcgaggcccagggtcgcgcgcgggccggccggggcggccagcagcaggtcgtgcaggttgtgggcgaacacgttgatcgcctcggtttcggcgccgtcgcgcaattcgccgagcaggtcggtttccaggtgggtgtagagcttgaccttccaggtccagcgcaccacttcgccgagccacttgtccgcaggacggttctgattctggatgccgaattgttgaccgatcatgccctcgcacgggtgcatggtgcctggcaattcgtcgccgaccttcagcgcggagctgagaatgccttcgttgcggccacggaaaatcgccagcgcgcggtgggacggcatgcttttcagcggctcgtcgtgttcgaagtaatcgcggaacttggcgccttcttcctctttgccggcgatgacgcgggcgctgaggatggcttcctgcttcaggtagctgcgcagtttttcgagcaggctggcgtcttcggcaaagcgctccatgaggatgtacttggcgccttcgagggcggccttgacgtcggcgacgcctttttctgcatcaatgaagcgggcggcttcaacttccggggccagcgacgggtcgttgaacagaccgtcggccagctcgcccaggccggcttccagggcgatctggcccttggtgcgacgcttctgtttgtacggcaggtagaggtcttcgaggcgggtcttggtgtcggcgagcttgatgtcgcgctcgagttgtggggtcaacttgccctgttcctcgatgctggcgaggatgctgatgcgccgttcgtcgagttctcgcaggtagcgcaggcgctcttccaggtgacgcagttgggtgtcgtcgaggctgccggtcacttctttacggtaacgggcgatgaagggcaccgtggagccttcatccagtagagcgacggccgcttcgacctgttgtgggcgtacaccgagttcctcggcgatgcggctgttgatgctgtccataaaaccacctgaaattctgaaaagcagctcgcaggcccggaaaacaaggccctgggaggctggttgagcggcccgactggcgccgctgcctgggtcaagaggcagcctattgaccctcgaaatcgaaaaattcgcgacaagcgggtgaaaaaagcctcggcagcaaacggtaacgatctgacgttgccctgcacggcggcggcgcattataaccagcgttctgtccttgggggggattgcgccaacggttgtagggcgcgggttcgctggcggtagaggaaaaatctgctaacaatgcacacggtgcgtataacggcagctaggccataatgcgcgccgagataagaggagcatccaatgagcagcactgcacaaactgctgaaggcgaaaaaattctcatcgttgatgacgatccggggctgagcagcctgctggagcgtttcttcaactccaagggctaccgtgcccgcgcggtgccgaataccgagcagatggaccgcctgctggggcgcgaagtgttcaacctggtcgtactcgacctcatgctgcccggtgaagacggcctgaccgcctgcaagcgcctgcgcggcgcgaacaaccagattccaatcatcatgctcaccgccaagggcgatgagctgagccgtatcaagggcctggaactgggcgctgatgactacctggccaaacccttcaaccctgatgagctgatggcacgggtcaaggccgtattgcgtcgccaggccccgccggtaccgggcgcaccgggcagcgaagacgaaagtgtcacctttggcgactacgaactgtcgctggcgacccgtgagctcaagcgtggcgatgaagtgcacatgctcaccaccggcgaattcgccgtgctcaaggccctggtgatgaacgctcgccagccgctgacccgcgacaagttgatgaacctggcccgtggccgggaatgggatgccctggagcgttccatcgacgtgcagatctcccgtctgcgtcggatgatcgagccggacccgtccaagccacggtatatccagacggtgtggggcgtaggttatgtgtttgtgccggatggcaacaaaaccagttgaccgatgatttgcagttacgggcctcccggtgtctgactccatgagggtcgacgggatgcccggcgtctgcaattctgcgagcgccgctcgtttctgcaaggtatccagctgtcttctatgaaaaccccgttgtggttcccccaaagtttcttctcccgcaccctctggctggtgctgatcgtcgttctgttttccaaggcactcacgctggtttatctgttgatgaacgaggacgtgctggtggatcgacaatacagtcacggcgtagccctgacgttgcgtgcctattgggccgctgaccccgagaatcgcgagaaaatcgccaaggccgccactctggtgcgtgtggcgggcgcgggtgtgccggaaggcgagcagcattggccctacagtgagatctaccagcgccagatgcaggccgagctgggtgaagacaccgaggtgcggttgcgcatgcatgtatcgccggcattgtgggtgcgtgcgccgagcctgggcgaggactggttgaaagtgccgttgtatccgcatccgctgcgcgggcagaaaatctggaacgtgctgggctggttcctggcgatcgggctgctttcaacggcgtcggcgtggatctttgtgcgtcagctcaaccagccgctcaagcgtcttgtgtttgccgcccgccaattgggtcagggacgcagtgtgcgcctgccagtcagcgatacgcccagcgaaatgaccgaggtgtatggcgcgttcaaccagatggcggaagacgtcgaacaggctgggcgcgagcgcgagctgatgctggcgggggtgtcccacgacttgcgcacaccgttgacgcgattgcgcctgtcgctggagttgatgggcaaccatacggatctcaccgatgacatggtccgcgacattgaggacatggacgcgattcttgaccagttcctggcgtttatccgcgatggccgtgatgaggtggtggaggaagtcgacctgacggacctggtgcgtgaggtggtcgctccctataaccagaacggcgaacaggtgcgcatgcgtctggagccgatccagccgtttgcgttgcgtcgagtgtcgatgaagcgcctgttgaacaacctgattggcaacgccttgcaccacgccggttccgatgtggaagtggcggcgtatgtgtctggcgacagtgcagcgccctatgtggtgctgagcgtgatggaccggggggcaggcatcgacccggatgagttggaaggcatcttcaaccccttcacccgtggcgaccgtgcccggggtggcaagggcactggccttgggttggcgattgtgcggcggattgcctcgatgcatgggggcaatgttgagttgcgcaaccgcgaagagggtggcctggaggcgcgggtgcgcttgccgcttgggctgatgttgcctcgcgacgcggtctaagcaccgacacaggtcaaatgtgggagcgggcttgcccgcgaatgcagggggtcagtcgatacatatttgactgatccaccgctttcgcgagcaagcccgctcccacactggtttgtggcggttgatcagcccttgcccttggtcctggtcatattcggcccaccattcttctccagatgctgaatgatgatccccgccacatccttcccggtggtggtctcaatgccttccaagcccggcgacgaattcacctccatcaccagtggcccatggttggagcgcaagatatccacacccgccacggccaaccccatgaccttggccgcccgcagtgcggtcatgcgttcttccggggtaatcttgatcaggctggcgctaccgccacggtgcaggtttgagcggaactcccccggcttggcttggcgcttcatcgccgcaatcaccttgtcgcccaccacgaagcagcggatatccgcaccaccagcctccttgatgtattcctgcaccatgatgttctgcttgaggcccatgaacgcctcgatcacggattcggccgccgtcgcggtttcacacagcaccacgccgataccctgggtgccttccagcactttgatcaccagcggcgcgccattgaccatgtcgatcaggtcagggatgtcgtcgggggagtgggcgaagccagtcaccggtaggccgatacctcggcgcgacagcagctgcagggagcgcagcttatcccgcgagcgggcaatggctaccgattcgttgaggggaaacacccccatcatttcaaactggcgtaacaccgcgcagccataaaacgtcaccgaagcgccaatacgcgggatgacggcatcaaacccctccagcggcttgccccggtagtggatctgcggcttgtggctggcgatgttcatataggcacgcaacgtgtcgatcaccaccatttcgtggccacgttcggtgccggcctcaaccaggcggcgggtggaatacagacgcgggtttcgcgacagcacagcaatcttcatgcagcacctgggacagatagggtagagaccgggaacaccggcttgtcttgaacgtacttgataccgggattgaccaccaattggccgtcaatcaaggctttggagcccagcaacaggcggtaacgcatggctttgcggcaggccagggtaaattccacccgccatacccgatcacccagcgccaacgtggtgctgatgacatagcgcacctgcgcatggccattggagctcttgatggttttcatcgtcaccaggggcgcttcgcagcggcggtgacgcaattgcacgacgctgcccaagtgcgcggtaaaacgcacccactgctcgccgtcgcgctcaaacggctcaatgtcggtggcgtgcagacttgaggtgctggcaccggtgtcgatcttcgcgcgcaggcctgccactcccagatcgggaagtgccacccactcacgcagacccacaacggtcaaatggtcaaatgtcttcaatatggataaccgatcaattcgcccaggcctgaggggatacctcggccagggctttaaatgcaggcttggcgaaccagtagccttgcatcagaaatattccgcagtcggagagaaagtcccgttcgccggcactttcgatgccttcggcgatgacagtaacccccaactgctcacagattgtgacaatcccctggacgatgacctgacgaacacgatcctgatcaacatcgcggatcagcgccatgtcgagtttgatcaggtcaggttggaaatcagccagcaggttcagccccgaatagcccgcgccgaaatcgtcgatggcggtcttgaagccgaattcgcggtattcacgcagaatattcgtcaaatggcgatagttatctacatgctcgctttccagggtttcgaaaatcagccggttcaacggaaaattatgtgcgcgagccgcctccagggtgctacggatgcacagttccgggcggtacacggcattgggcatgaagttgatcgaaaggtgcgtttgcatgcccaaggtcgccgcaccggcgatcgcctgggttcggcagcgttggtcgaagcggtagcggttgctttcgttgacttggtccagcaccgacagcgccccttcgccttgtgtgccacgcaccagggcttcgtgggcaaagatcgaatggtcccgcaggtctacgataggctggtaagcgaacgcaaaatcgaacccgaggagctcgctttgctggcaacccacacagcgctggttgggcgaggtgagtgaaaggggaaattcggtcacagcatacctcgcgaaaacagggtgctacctggcgtatcttaggtgagccttggggtttatgcgtcgaagggtttcaacggtaaagttgcgacatttttcagagcgaggaattcaagtggctcaaaagcaggaagaggaagaaaaggtccgtctggacaagtggctgtgggcggcgcgtttctataaaacccgtgccctggccaaggccgccatcgagagcggcaaggtgcatcatcgtggcgagcgctgcaagccgggcaaagagccacgtgtcggtgatgagtttcagattcgtgcagggtttgatgaaaagacggtcgtggttcaggcgctttccatcgttcggcgtggcgcacccgaagcgcaagcgttatacgccgaaaccgaagccagcatcgccaagcgtgaaaacgcggcggcgatgcgcaaggccggcgccacgggcatgaccaccgatggcaaaccgagcaagaaacaacgccgcgacctgttcaagtttcgcggcagtggcaacgatgactagcctcaatcgaacgggcctttgtggcgatcgggcttgctgtggtgagcgggcttgccccgcgctggagtgcgcagcgctcccgttttttggagccgctccgcagcccagcgcgagcaagctcgctcactacaaattattgcgcaggcctgacaacgctcattcgccccactatgggtaaacgagcagccagcccaaacaccggcgccgtcacccgcaacaacccactcgataccgtcgccgcaaacggtgtgtagtatccccagcccagcgccaacagcgccagcaacacaccgccgatgtaatcgtcctgcccccaatgcgcccccgccaccaggcgcggcatcatgaacagcagcgccaggccccagatcaccagcacctggcccgcgcgcttggcgaacacggtcatgaacatcccccaaatcagcagcaccgaggcgtggtccccggggaagctctggctcgaacggtccttcaactcccaggtcttctccaggcctgggaagtagtcactcatctggatcgccccgctgatcaccatggacgggctatggtgttgccagcccatgtgcgcagcgagtttggaaaacagcatgcggataaacagcaacagcaacagaatgccgacaaaacctaacaaagcctggcgcacctgcaccgccttgaacacccaatcgccgcgaatcaacagcgtcagcagaatcaccccgaccaccgcatcgaacggtcgcaaactcgctacagcccacacgtgcagccatgcggagttgctcgccagcgggtcgttgagcaggtgaaacagccactcgtcgaacatcacacacagcatctggcccgtgggccacagccaaaaacacagcaacccgacagcgagtagattgcaaacggcccatcgcccgaggttccacttggcttggaacaaacccggattgttcataaactgtcccccacggcttcagaaaactgcaccaaaacggtgctaaagcgtttaattctataaaccttgtaatcaatttgtcatcaattcagatacccagacctatgactgatctaccggataccgacttcacccaacgcttcatcttcgacgagagcgacgcccgcggcgagctggtctcgctggagcgcagctatgccgaagtcctcgccaagcacccctatccggagccggtcgcgcaactgctcggtgaactgatggcagcggcagcgttgctggtgggcaccatgaagttcgatggtttgctgattctgcaggcgcgctccgaaggcccggtgccgatgctgatgatcgaatgctccagcgagcgtgaaatccgtggcttggcccgttatgaagccgaccagattgcgccggatgccaccttgtccgacctgatggccaacggcgtgctggcaattaccgtcgatccgaccgaaggccagcgctaccagggcattgtcgatctggatggcgaaaccctgtcggactgcttcaccaactatttcgtgatgtcccagcaggtgggcaccaagttctggcttaacgccgatggcaagcgcgcccgcggcatgctgttgcagcaactgccgcccgaccgcatcaaggacgaggatgagcgcaccgacagctggcgcaagctgaccgccctggccggcaccctcaccgctgaagagcaactgggcctggataacgaaaccatcctgcaccgcctgtaccacgaagaggccgtgcgactgtttgacgcacagggcctgcgcttcaattgcagttgctcgcgtgagcgttcggccaatgcgctggtcagcctgggcctggaagatgcgcaaaacctggtggttgagcacggcggccatatcgagatcgactgccagttctgcaacgagcgctacctgttcgatgcggccgatgtagcgcaattgttcgccggcgcaggcatcgacacgccttccgacacccgccactaaaacgtttaagcacaggtaaatcacctgacaaacgccggattagcgcagttctgacgggagggccctactctttttgggcttttctggcataatccggcccacttttttcgcggtagtagtgcgcaactttctactacaaaacgtttggagcactcggccataggccgacggggaacctcatgacgcaagccaacaacgccgtatacaccgatctgagtgttgacgatctggttaaagaagccctgcagcgtggtgaaggcgtgctcgccgatactggcgcgctggtcgtcgaaaccggtcaccgtactggccgttcgccggtcgaccgtttcatcgttgaagagccttccacccaggcttccatcgcctggggcccgatcaaccgcaagttcccggccgacaagttcgatgcgctgtgggctcgcgtcgaggcattcaacaacgcgcaagagcatttcgtttcccacgttcacgtaggggctgccgaagaccactacctggctgtgaaaatgaccacccagacggcctggcagaacctgttcggtcggtgcctgttcatcaacccggcccagtacaacccggccggtcgtgaagagtggcaagtgctcaacgtggccaacttcgaatgcgtgccagagcgtgacggcaccaactccgacggttgcgtgatcctcaatttcgcccagaaaaaagtcctgatcgccggcatgcgctacgccggtgaaatgaaaaaagccatgttctcggtgcagaacttcctgctgccggcttccgacgtactgccgatgcactgcgccgccaacattggcgaagcaggcgacgtgaccctgttcttcggtctgtcgggcaccggcaagaccaccctgtccgccgacgaaagccgttacctgatcggtgacgacgaacacggctggggcgaaggcgtggtgttcaacatcgaaggtggttgctatgccaagtgcatcgacctgtccgagaagaacgagccggtcatctggaaagccatcaagcacggcgccgtgctggaaaacgtggtgatcgacgacgccaagcacgccgactacaccaacgtcagcctgacccagaacagccgcgccgcctacccgctggagcacgttgccaagcgttccgagaagaacctgggcggcgagccaaacgcggtgatcttcctgacctgcgacctgaccggcgtactgccaccggtgtcgatcctcagcgaagaacaggcggcctaccacttcctgtccggctacaccgcactggtgggctcgaccgaaatgggttccggtggcggcatcaagtcgaccttctccacctgcttcggcgcaccgttcttcccgcgcccggctggcgaatacgctgaactgctgatcaagcgtatccgtggcttcggctccaaggtctacctggtcaacaccggctggaccggcggcggctacggcgtcggtaagcgcttcaacatcccgaccactcgcggcgtgattgcagcgatccagagcggcgcgttggtcggtgctgaaaccgagcacctcgacaccatcaacctcgacgtgccattggccgtaccgggcgttgaaaccggcctgttgaacccacgtaacacctgggccgacaaggctgcctacgacgaagcggcgaaggcgctggccggtctgttcatcgagaacttcaagaagtttgaagtgagcgatgcgatcaaggcggcaggtcccaagttgtaagattcagtcgttgtgaaaaagccgcctcttgtagggcggcttttttgtgcgcggtgtcttagtcggcaatatgtaaaaccaccgcgccgaccagtaccagcacaacgcccagtacctgcaccgccgacaaccgctccttgaaaaatacgaaccccaggatcgccgcgatcccgcctgataacgtactgatcaccgtcaccaccgacaccgaacccgccattgccccccacgaaaacgccgagaacccgccgaggttcatcaggcttgccccggtcagcgtcgcacagtttttcagcgctgggattttcaggccgtccttgatcttcaacaccatcaccaccagcacgcacaatccaaccatgtaacccagccacaacatggtgatcggccccagcgccggcagtgtgtagcggccttgcagccagaagctggtgccatacagcaaggcggcaagcatggcgtaggcgatggacaggcgtggactgttatggggggtgccgttgtccttgtgaatgctggagaagatcacgccgatcacacacagggcgatacagcccagttgcgtcaggctgatgtgttcaccgctggcccaggacagcaaggtggtcaccacgccgtaggaggtcaccagcggcgccacgatggcggctttgcccagggcgaaggccttggacagcgccagggcgccggagacggtgaacagggcggcagcgatgcccagcagccagacgctgagcgcggcgtcgagggctttgaacaggaaggtcgggaggatggccaacagcagggtcatgatcaggaagcccagcgcctggccgaaatacaccgcgcgttttacgcccacggcacgggcgttgaggcccacgagaaaatccgtgccgccccacagcagggcggccagcaggcccatagttacgtccatgtaaggtccttgttgttttgagcacgctcatcgaatgtgggagggggcttgcctccgaaagctgtttatcagcctgtatatctgtgcctgacacaccgctatcgggggcaagccccctcccacatttgagtgccagtgtgcctggaatttgtgttcgctcagctcaggttttccagcgtctgcgtgtcccagctgtgagtcttgatcgccaggtagagcatgccgatggtcagcggcactttttcgccgcgccccttggcccgacgcttgagaaatacatcaaacaccggagggttgaagtaacgataagtgtcgtagtcacccaggtcgagcgcaaattcctgctccagcgcttccatcagttgcttggcctcactgccgtcacagcccaggtcgaagttgatcgaagtttgcaggcggatcgtcttgtgttttggcaggccgatttcttcgtgcaaaagctgcaggagttgctgcatgacggggtcttcggggaagttgggggcgaggttcatggtgggggcacgcaggagtgggtgatcggcttttactttgcaatagatattctgagtgctcaataacccgatgcctgtcacgaaggcgattattggcaggctcccaagctgtgcacctctgatccatgaggtggcatacaacagaagtattgggccggttaccaggaggcagagtccaaaccatcttctgagcactggcagctttattgtcctgtcaattatggcggccagtgcgatgaggaggagcagataaatccattcgatgtattcgttcatcgtcttagccactctggagctgttgagccgtagccaatatgttgagtcctttcaatgttcacttgtatttgccggggctgctgaaagggcgccagtttcagtcagagaaaggtgagttttatagaggggtgggcaggagttttaagcagtttcagaaggggatgtcgtggtatttggaggtttcttacagggctttccgggatttgtggcttgcagtgacttaacagtaaaacaggcaagtgatgtgagggggggtgggatgtgtcagttgccgaccggcctactcacacaccgctcaaaaatcgcctccaacccccgataatcacaggccaccgcatcaatattcgcgggtatccacgccgcgtgtttcaccagccaccagttcacggaaaacccggcattcacgatgatctgctcgaacaaaatccgttgcgcccggccgttgccttcacggaaggggtggatgacgttgaggtcgccataggcttcggcaatctgcgtcaccagctcggcctggctcgccccgacataccagttcgctgcctccatttgccggatgattttcgccgcttccggcgggatgcgttccggggtgcagaacagggtgtcgcctttctggatgttgacgctgcgcagttcgccggcccaatcgtagaggtcgctgaacaggatgcggtggatgtgttgcaggcgttcgaggtcgtagggcggagggaagagggggaggttgcctacggcgatttcggataattcccgctcggcctggtgcagccggggttcatcgagcaaaccgaggcggttgcgcaggacgctgctaccgggatagcagtacgggtcctggcccaccccatatttgtcgagcatcagcgtggggtgttgcggtacttggcaaggacggcttcgcgggtcggcagtggtttgtcgacgtcggccggttgggtgtcgaacccttccaggcgcaggctggccaggtaattggaacggcggatcttgtggtaatgatcctgtttttgctcaaacgtcggttcgctcatggcagcgtactcctgggtagcaaggcttgattgtagcgcaatgcgtcaacgggcaggcgggataaaaaccacgtcacattctgtataaataatcctccagtgggcgcatttaagagtatgtttcaccgcaaaatcttgcagggcgattccgcccgctacttaaagggagttaagcatgggtttgctgcgtgttgcttcggcgatgtcattgtgtgcggtcgcgttttcagtccaggcggcgcaattgccgattgaagtgctcagtgcggtggtcaaggaccagaagatcgcggatgccgaggtgttgctgcaacgcaacggtgcgcagaacgtagtgggccgcaccaacgcccagggccaggtgaccctcaccagcgaagccgcagatgacgccaccaatcttctgatcatcaagaagcctggctactcgaacctggtggtgaagtgcccgtgcgccggcatgacgtatgccatcagcccggtgatggaaaacctcgacggcctgcgtgtggtgttgacctggggcaagaccccggaagacctcgactcccacatgatcttcccgggcaacaatatctatttcgagaacaagacgggcaccgacgccgaactggacgtggatgacgtcgacagctacggcccggaaaccatcaccctgcagaaaaaacactacggcgaaagctacgtgtatgccgtgcatgacttcaccaacggcggcaatcccggttcgcgccagctgtccaacagcgaagccaaggtgttcgtgtacatgggccaatcgctggtacgcacctactacgtgccgaaaaaccgcagcggcaacctgtggaccgtgttccgcatgaccggcagcggcgactttcaggacatcaacaccttcagtggcgtgacggtgaacgcggcgaatgtactcaacgaagtcaaaccgttgctggatgacagcgtggctgttaccgccgttgcggtcagctcttctgcacaagccgatgcgaagcgtctgaacgtgcaaggtgaagcggcctaccaggccgccaagctggaccaggccatcgatctcttccgccaggctatcgagctggacaacggtttcggcaaggcctacggcaacctgggcctggcgtatcagaaggccggcaacaccgccgagtcgatctgggccaaccgcaaggctatcgccctggcaaccggcgcgaacgctgcgacggtgcgagcgggcgcctactacaacattgcgcggatctacgaagcggcggggcagttcccggatgcgttgcgtcactatcagttggctaaggagcagaaggccaacccggtgtatgacacggcgatcgagcgggtgcagaaccgctgattcagccctgatacagaactaaattgtgggagggggcaggtcctctcccacatcgggtttgtatccttcctgttcctccctcggattattcccacttcggccctaggccatccttcgccctgtgtatcatcctgtctcttttttccatgcgacctttctcgattcgccgagattcccaggctatgtttttgagccaactcagcggtcaatggagtgacagcctatgcacgacaccctccaacaggtctttggttatccacagtttcgcctgggccaggaagaaacggtcagcgccatattggcggggcgttcggcggccgctattttccctaccgggtcgggcaagtccctgtgttaccagctgtcggcggtgctgctgccgcacctgacgctggtggtgtcgccattgttggcgttgatgcaggaccagctgggtttcctgcagcgccatggcatttcggcgggcagtatcgactcggcccagagccgcgatgaggccaatgaggtcatggcccgtgcgcggtcgggggagctcaagatcctgatgatttcggtggagcgcttgaagaacgagcgcttccgtaacttcctgcaaagcgtgcggatctcgttgttggtggtggacgaggcccactgtatttccgaatggggccacaacttccgtccggactacctgaagctgccggactaccagcgccagttcaatatcccacaagcactgctgctgacggctacagccacgcccaaggtaatcgcggacatgcaggcgaagttcgccattgcctcggacgatgtagtcaccacgggcttttaccggcccaacctcaacctgctggtggaaccggtcagtggtgcggacaagcgtcgccggctggtgcagtggatgaatgagcgcgtcggccagccgagcattgtttacgttaccttgcagaaaaccgccgagcagattgccgagcacctcaatcgcaacggcatccaggccgaggcctatcacgcggggctgccccacgataaacgcgagggcatccagcagcgcttcatgggtggacgctccaattgcatcgtcgccaccatcgcgtttggcatgggcatcgacaagagtgatatccgcaacgtggtgcacttcgacttgcccaagtccatcgagaactacagccaggagatcggccgggcagggcgtgatgggcagccatctgattgcctggtgctggccaatcgcgacagtctcaacgtgctggaaaacttcgtgtacggcgatacgccggagcaggaaggaatccagcgggtgctggaagagttgcaggccgcgcggggcgatggacagtgggaattcttgctcaggtcgttgtcggaccacagcaacatccgcgagctcccattgaagacgctgctggtgcagttggagctcaagggcgtgatcgcgccgcgctacgcgttttatgccgagtaccgtttcaaatatctggtcgagcctgaggttctgctggcgcgattttccggtgagaggcagcagtttgttgcagcgatcatccaggtgtgcaaacgggcgaagacctgggctacggtggatttcgatgcactgtatcaacagcacaatgccgagcgcggacgggtggtgaaggcgctggattacttccaggagcagggcctgatcgagctggaaagcaagcagatgactgaggtctacagcctgctggagaccgatttcgatccacaggtattgagcgctgagttatacacaggcttcaagcagcacgaggtgggagaagtcgcgcggattcacgcgatgctcgatctgttcgccaccgaatactgcctggggcagagactggcgaagtattttggcgatgaaaacgcgccgcagcgctgtgggcattgctcagtgtgccatggccatgttgcgcatctaccgccgccgccgggcttgccgccacttgtggataagaacttcatggggctgtgcggtgattttatccacaggcatcatgaacacaccggccaactgccaggggcggaacgcctgacgcgtttcttggggggcatcagcgtgccgctgttcaccaggttgaaggcgcggggtattccgggttttgccgtgctggaagactatccgtatgccgaggtgcgcgaatgggcccaggcccatttgaatgatctgtaactcactttcacgagatgacccgatgcctgacaccgtaccgcaacgcgccgattaccctcacttccagccgatcatcacgcgctggcacgacaacgatgtgtatggccatgtgaacaacgtgacctactacagcttctttgacacggcagtgaatacctacctgatcgagcaaggtggtttggatattcatgacggcgacgtggtggggtttgtggtgagttcggcgtgcgactattttgcgtcgatcgcctttcccgagcgcatctacatcggcttgcgggtaggcaagttgggcaacagctcagtgcagtacgagttggcggtgttcaaggcgggcgaagaagacgcctgtgcggcggggcggtttgtgcatgtgtttgtggatcgcgggtcgaaccagccggtgacgattccagcgcggttgcgcgaggcgttgcagcggttgatcacgctgtaggagccggcaagccggctccatattcagcaacaatcagtcgcggtagtggtgcttgttcttgcgatggccataggcatgaccgcgcccacgatgatcatcacggtcataacgacggtgatcacgcccacggctgcgacggtcgtcgtcatcgctcttgttgcccatgtagttgcccagcgcgccaccggcaccaccgccagccgctgagccgatcagtgcgccggtgctgccgccgacactgcggcctacaacgttgccgcccgccgcgcccaatgcgccaccaatggcggcttcgccacggctgcgcttgtcggcgcccaccgcactaccgcccgcgccacccaaggctgcgccgatggtcgaaccggtgttgccgcctagctgctggccaacgaccgaacccagaaccccgcccaatgcgccgcccacaccggcttcggtggtgccaccggccatggctgcgccactgaccaggccaagggacaacaagagaatcgaggagaacttcattagggaaacctcaagaggatgacggcgcgatcctgaggctgtatctgaattgtgacaatagaaatccgaccagtagcacgagttgtacacaattccataacttattgtttttgctggggaacttaagtcaaattcgtgagtctttagctacttcggaacggccgcttttatgcaaaagcggccttttttgtgcccggaattcctttggcggggtaattccctgtggcgagcccgctcgccacaaccgaagcaaaccgacggatttgtgtcaggccgaacgcgccatgatcaagccattgtcactcgccgcttccaaccggatcgccacgaacttcgacgtcggtgtatggctgccatccccggtgctttccagcggcaccagcgggttcacttccgggtagtaagccgcagcctgccctgccggaatatcgaacgccagcaaggtaaagcccttcacacggcgctcacggccgtcctcccacaacgacacgatgtcggccttctgccctggcttgaagcccaggcggatgatgtcggcttcgttgacgaacagcacgtcacgctggcccttgaccccacggtagcggtcgtccaggccatagatggtggtgttgtactgatcgtgggagcgcatcgactgcatgatcaggtccggtacgcggccggtcgcgtgggtgcgttcgtggatcaggtccttgggcaggatgttcgggcggaagttggcacggcccgacggggtgttccagcggcgcgcgcccgcggagttgcccaggtagaaaccgcccggatgcttgatcttctcgttgaagtccttgaagccgggaatggtgtcggcaatcaggtcgcggatgcggctgtagtcggccaccagccagttccagtccaccggcttgctgcccagggtcgcggcagcgataccggccaggatcgccggttcggacttcatgaatttcgacagcggctgcagctggccattggagccgtggaccatgctgaatgagtcttccaccgtcaccgcttgcgggccttcggcctggatgtcgatgtcggtacggcccaggcacggcaggatcagtgcatctttgccgtgcatcaaatggctgcggttgagcttggtgctgatctgcacggtcaggtcgcaattgcgcagggcttcgaaggtgcgtgggctgtctggcgtagcttgggcgaagttgccgcccaggccgataaacaccttggagcggccttcgagcatggcgtggatggcttccaccacgttgtgcccgttttcacgcggcacctggaattggaagcgacgctccagggcgtcgaggaatgccaccggtgggcgttcgttgatgcccatggtgcggtcgccttgcacgttgctgtggccacgcaccgggcacaggcctgcgcctgggcggccgatattgccgcgtagcagcatcaggttggcgatttcctggatggtcggcaccgagtggcggtgctgggtgatgcccatcgcccagcacatgatcacgttcttgcctttggcgtacatgcgcgccgcttgctcgatctcgaccagggtcaggccggactgttcgacgatctcatcccaggaggtgtcgtcgatcttgcctaggtaatccagcacgttggcggtgtgttcgttgaggaagtcgtggtcgaacacggcctccttgccttcagcctgggcctgacgttcccacagcagcaggaacttggccatgccgcgcaggatggccatgtcgccacccagcgccgggcggaagtaggcggtattggttggcttgtcgccgttggtgagcatttccagcgggtgttgcgggtgctggaagcgttccaggccgcgctctttgagtgggttgatgcacaccacctgggcgccgcgtttaaccgcttcgcgcagcggttcgagcatgcgcgggtggttggtgccggggttctggccccagacgaaaatcgcatcggcatgttcgaagtcatcaaaggtcacggtgcctttgccgacgcccacgctttgcgccagggcaacgccgctggcttcgtggcacatgttcgaacagtccgggaagttgttggtgccgtaggcgcgcacgaacagctggtacaggtaggctgcttcgttgctggcgcgacccgaggtgtagaactcggccatgtccgggctgggcagggcgttgagatgcttgccgatcaggtcgaaggccgcttcccaactgatgggcgtgtagcggtcggtttcggcgtcatagcgcatcggctcggtcaggcggccctggtattccagccaatagtcgctctgttccagcaaggcggtgacgctgtgcttggcgaaaaatgcaccatccacgcggcgcttggtggcttcccagttgaccgccttggcgccgttttcgcagaacttgaccatgccgctttccggcgagtcgccccaggcgcagcccggacagtcgaagccgccgttctggttggtcttgagcatcatgcgcaggtttttcagcgcgttgtcgctggtcagccaggcctgcgccacgctgatcagtgcgccccagccgccggccgggcctttgtagggcttgtagcgcggggtcggggtttggtcggcttggtgatgttggttcatggctggttctccatcgcaggactgtagacccgcggcgcacttttctgcggcaggtggatgagattgaggttatgccggcgcgcccattgcagggcgaggccggtgggtgacgacaggctgaccagggtctggatacccgcgcgcaggactttctggatcaactccaggctgcaacggctggtaacaatcgccaggccgccttcggtcggaattttttggcggatcaatgcaccgatcaatttatccagggcgttatgccggccgatgtcttcgcggcccagcaacaattcgccctggccgttcataaatacggcggcatgcacggcgccgctgtactggcccaagggctggaacgcgctgatgcgttggcgcaggccatccagccactcggcgggcggcaatggcgcgcccggcaacacgtctaggtcgggcagcgcttgttcgaccgcttccacgccgcacaggccgcagccactggtgccggccaattggcggcgctgctgcttgaggttccagaaggcgcggctggatatctgcacctgagcgtactgggcagagcctgatccgctgagctttaggtcataaatgtcgctaacgtcggcgataatgccactgccgatgctaaagccgacgataaagtcttccaggtctgtcggcgtcaccagcattaccgcttggctgatgtcgttgtaggcaatcgccaacgccacttcctcggccagggctgtgctggcgaattccgtgtgttcgagattgcaatactggtagctctggctggcggcgggcgctggcgtttcaagagcgggcgccgcgcagactgggcgcttggcgttcatggggcagtaccaccggcggattgatcagtgtttagactaggcgcgacaaagcgtcgcgtctaattgccagtactgatctaccgatagatgacgtcgatcaaggctcgttttgcgatttttgatacagcgcgaaacacgcctcggccaacgccgagcgcggtgcaccgcggcgcatgatcaagcccagacgagcgagtgtatgggcgtcctcgatcggctgcaggcgcagatgctcggtgagtgcgtccaggccaccatccaaaggcatcacggcacagcacaggccgccatgcacggcttgcaacaactgatggacggcatcggtctgcaacagcggctgcgggttgagcccacggctgtggaagttgtggtcgatggactgacgaaagtgcatgccgctggtgagcatgcccaggggcagttcgatcagggcttcccagctcaacggcgtgtcgccaaagctgaagaagcgttggtcgtaaagcaggcccatgcgggtttcgcccaaggccagggagtcgaagcgctcgttgtccaggcgctccaggtaagacacgcccaggtccaggcgattgctcgccagttgctcaaggatctgttcggagctgagcgccgacaactcgaagcgcaagttcgggtgctctttatgcagttgctgcatcaacgccaagggatcgaagctcgacagcggcaccacgcccaggcgcaatgtgccgacgaggttgccgcgacaggcggccgcttcggcctgcaaaccgtcatacgccgccagcaccgtgcgcgcccaggcaagcacgcgttcgccgggggcggtaaagccctcgaagcgctggccgcgattgaccaagggcaggtccagctcttcttcaaggctgcgcaggcgcatcgacagggtcggttgagtgatgtggcaacgcgccgccgcctggccgaagtgacgcgtctcgtcgagggcgatgaggaatttcagctgcttgatgtccatcttcgctccagggcttattccaatggcggggggattctagcgcgtttgggtcttttgccgggctggaacccaagtctgtaggactggtctagtcttgggcatctggaattcaattaacaaggagcgcgcactatgagcattttcagctttatcaaggaagccggcgaaaagattgtcgacctgttgacgccgggtaatgcaaacgccagtgagcagttgaaggagcacgtgtccaaagtgggtctgggtaatccgaatgtgcagaccaccgtggatggcgacaaggtgaccgtgaccggtgaagtcgccacccaggaagagaaagagaagatcctgctggcgctgggcaatattgccggtgtggccagtgtggatgaccagatcaccgtaaccggcccggctgttactgccgcccgtttcgtcgtggtgaaaaagggcgacacactcagcgcgatttccctggcgatgtatggcaacgccaaccagtacaacaagatcttcgaagccaacaagccgctgctgtcgcacccagacaaaatctacccagggcagacactgcgtattcctgagtaaaacgcaggacgaaatgtgggagggggcttgcctccgatggtggtgtgtcagtcactgaatgtgtctctgatgcaccgccatcgggggcaagccccctcccacatgggttcagagtccggcaatgagatcccggtagtcttcgactgctgcaaattcttgtgtgtccttcggccccttcttgctgtccggctccttcaccgccagcaaatgccccacgccaaacgcctgggcgctgcgcaggatcggcaaggtgtcatcgataaacagactacgtgccgggtcgaagccgatatccgcttgcagggcatcccagaactgcgggtgttccttggcgaaaccataatcgtgggagctgatcaaccgttcgaaatacggcgccagttcaatgcgttccaacttcaatgacagcgaatcacgatgagcgttagtgatcaggatcacacgcttgccagcctgtttgatcgccgcgaggaaggtatcggcatccgggcgcagggcgatcaggtgagcggtttccagcttgagttcgcgtaccgggatcttcagctcagtgctccagaaatccaggcaataccattgcaactgtcccgcgttacgctcgaacagcggctgcaactccatctcggccatggcgcggctcacgccatgcaactcggcgtagcgctggggcaggtgttccatccagaagtggttgtcgaaatgcaggtcgagcagggtgccgtccatgtccagcaggacagtgtcgatggcgtgccagggcaaagagggcatggggcggtctcatgtaagtaaagatatccgacacagacaatcggaaaagccacggtatagtaacccgatcacgccaaggagccgctcatgcgccagaaacccaccgtcctcgcccgcgaaatagtcgccagtagccgtttgttccgcgtggaggaagtgcaattgcgcttttccaatggcgttgagcggacctacgaacgcctggtgggccgcggtgccggctatggtgcggtgatgatcgtggcgatgatcgacgctgagcatgcgttgctggtggaagaatactgcggtggcaccgacgaatatgagctgtccttgcccaagggcttgatcgaacccggcgaagacgtgctggcggcggccaatcgcgaactcaaggaagaggccggctacggcgcccggcagttggagcacctcaccgaactgtcgctgtcgcctggctacatgagccagaaaatccaggtggtactggccaccgacctctatgaagaacgcctggaaggcgatgaacctgagccgatgcgtgtggaccgggtcaacctgcgtgagctgtcgatgctggcgcaaaatgagcaattcagcgaaggccgcgccctggccgcgctgtacctggtacgagacctgttgacccagcgaggagcgtttaacgcatgagcgaactgtttttaggccacccgtttattgccccggttatcgagctggcccgtcaggccggtgaagtgatcctgccgtactggcgcgctgacgtggccgttacgtccaaagccgatgattcgccggttacagcagcggacttggccgctcaccacctgatcctggccggcctgaccgcgctggacccgagtattccggtgctgtccgaggaagatgccgatatcgaccagagcgtgcgtgccggctggcagcgctggtggctggtggacccgttggacggcaccaaggagttcatctccggcagcgaagaattcaccgtgaacatcgccctgatcgaacagggtcgcgtggtgttcggtgtggtttcgatgcccaccaatggccgttgctacttcggtggcgctggcttgggggcctggcgctccgacgtgaaggaagcgcccaagcagatccaggtgcgtgaagcgccggcagcgggcgagtcgttcaccgtggtcgcgagccgtcggcacaccagcccggagcaggagcgtttgctgggcgggctcagcgaaggcctgggcgcgttgaaactgacgaatatcggcagttcgctgaagttctgtctgttggccgagggcagtgcagactgctatccgcgcctggcgccgacctcgcagtgggatacggctgcagcccaaggcgtgctggaaggcgcggggggcgaagtgttggaattgagcggtgagccgttcagctacccggcgcgggcatcgctgttgaacccgttctttctggcgttgccggccaaggccgcgtggcgcgagcgcttgctgaccctggcccgatcctaaggccaaaggtgggaggggcggtgtggcggtcagcggtgcaggacgtactgcccggtaaaggccactgcacgctcctcgctgccctcatttacaacccatgtctccagcgtcaatcgtgcccgaccatagcgcttgtacgtcgccacaaagcgcttccacaccttctcctccggtgcctggcacaccaccgtcgcatcccgtgtgaccggcagcggatagctgatctgcccttcctgaatcacgatgtgcccgtcttcgatgcctgcttcacgcagttgcaagtgcagccagccccaacccgccagcactgcgccgcaatacaggctgccgccgaacatggtgctcttgtggttgatgttggcttgcaagggcagatgcagttccagccgcccgtgttgccagtcgagcaccttgaggcccatttcccgggtgagggggatgtcgtggtgcaggatggattccaggtaacggctgtcgcggttcatgggggcctcttggcgagtgggggcggtcattcgtcatcgccgctttggttggcgaaattcaggccgtgcttgcgcagcttgtcgtgcaaggtcttgcgcggtacgccaagggcttcagcgaggctgcgcatggagccgtgggggcgggtcagctcggcggcgatcaggcttttttcaaactgctcgacctgttcgctcaggccgcccgaggtggacgtcagcacaccggcggcagggttgtccggcgttgcatccagtgccagctccaggcccagggcaaagcgctcggcggcgttctgcaattcgcgcacattgcccggccagctatggcgtagcagcagcgcgcgctggccgggttgcagttcgtgcaacggcaggccgtggcggctgctggcctcatcggcgaaatgctggaacagcatcagtgcatcctcaccccgctcacgcagcggcggaatacgcagcggcgcgacgttgagtcggtaatacaagtcggcacggaagcggccctggtcggcggactggcgcaggtcttccttggtggcggcgatgatgcggatatccagcgggatcagttgattgccacccaggcgctccaccacacgctcctgcaacaggcgcaagagtttgacctgcacatccaggctcatgctttcgatttcatcgaggaacaaggtgccgccgttggcgaactcgaacttgccgatgcggcgtttctgcgcgccggtgaaggcacccggctcgtggccgaacagctcgctttcgaccaccgattcagccagcgccccggcgttgatcgccacgaacggcccgctgcggcgactcgacaggtcatgcagcgcacgcgccaccacctctttgccggcgccggtttcgccgagaatcagcacatcggccttggtcgcagccagggcgccgatctgttcacgcaggcgcagcatttgcggcgaatgcccgaccagtcgcgtgctcaattgctgacgatcgctgagcgccaggcgcaggctgcggttgtccagtaccaggcggcgcagggccagcgcacggcgcacgctgtcgagcagggcgtcgctggcaaagggtttttccagaaaatcataggccccggcgcgcatggcttgcaccgccagcggcacatcgccgtggccggtgatcagcagcaccggcaggtccgggtcctggccgtgcagttcggcgagcagctccaggccgtccatgccgggcatgcggatgtcactgacgaccacgcccggccagtcccgcgacaggcgcgccgtgaggccgctggcttcgcccagggtcaggactttcagtccggccaggtccagggtctggcacagggcctgacgcaggtgtggatcgtcgtcgatcaacaccacctgaatctggttatcgatactcatacactgcggtcctcggacggttgcagactgacgcccggcgagccggcacgcaatttcaaggttaacagcgcgccgccttccttgtggttggcaaacagcagttcgccaccgaaggcacgcatcagggtctcacagatcgccagccccaggcccaggccctgggtgcgcgtcttggtggtatagaacggctcgctggcgcgccccagggcttccatgcagaagcccgggccgttgtcacgaatgtacaggttgacgccctgttcggtggtttcggcactcagccagagtctgcgcggcgggcctttttcggtgagggcgtcgagggcgttggccagcaggttgcccagtacctggcgcaggcgggtttcgccggcttgtacccacagggtggcttccggcaaatcgcggatcagttccacctccatcgaccgtcgccgcttggccagcaacgccagtgcatcgtccagcgccggttgcagggccacgctttcgggcgcgtggcggtcgcggcgggcgaaggcgcgcaggtgggcgatgatcgaggccatgcgcccggtcagttcgctgatcagcttgaggttgccgcgggcgtcatcggtgcgttcatggtcgagcaggatttcggcgttttccgcgtagctgcgaatcgccgccaggggctgattgagttcgtgactgatgctcgccgacatggtgcccagcgccgacagtttgcccgcttgcaccaggtcgtcctgggcgcgtaccagctcctgctgggcgtgttcgcgctccagcacttcctgtttcaggcgccggttgaggccttccaggtcactggtacgctcgaccacccgcgcttccagctcgcgacgggccttggcttcgaacgcaatgcgctccagatagtgacggcgacgttgcatcatcaagcccaacaacaacatcaacaccaacagcgtcgcgccgccgacggcaaccacagtgcgcaccggacggctaatcaacgaacgcggcgcgaggatctccacgttccagccggtctcggcgatggccgtggattgacgcagccacgcggtggtgctcaggctcagcggctgcgggtcgcgagtcgggtagggctggatagcgatgatggcctggcgttcttcagcggtcagcgggcgggtcgcgcggaatcgccattgcgggcgcgaggtcaggatcaccacgccgttgtggtcggtgaccagcagttgttccggggtgttgccccacaggctttcggtgtggtccaggtcgaccttgaccaccagcacaccgatgatcgtatcgccgtcgcgcacggcggcggcgaagaagtaaccgcgcttggccgaggtggtgcccaggccgaaaaaccgccccaggcgcccggccatggcttcgctgaaatacgggcggaacgagaaattgcgcccgacaaagctgtcttgtttatcccaattggacgccgcgagggtcttgccggtggtgtccatcaggtacatcacttccaccccggcctgggcggcaacctctttgagcagcaggttggcgttgaccaggttggtgctgacgttgggcgcgtccaatgcagtgcgcagggccggcaggtcacccaggatttgcggcagcacttcatagcggtgcagggtgccgagcaggttggcgacatacaggtcgagggtctggcggttctggccggccagttcgctgcggtaatagcgctcggccagatgctccagcggccacaacagcggtgccaggcacaacgccaagagggcgaggctgcgccagcggggtctacgcgggaggggtggagtcatgggagtcgtgcgcctgtgggtacaggcgcattatgcctagtgctgctgtgcaagacactcgcgcaatgcgtcttgccaatgtggctggctgacgtgccactgttgttgcaagcggctgcaatcgaggcgtgagttaagtgggcgctgggcgggtgtcgggtaggcgctggaagggatggcttccagctcggcacaggctttgccctgcttgcgcagatgctcgccgatggcctcggcaaaaccgaaccacgaagtttcaccttgggcggtcaggtgatacaccccccattcccccgctgtgcctgcttgccagcgttcgatcaatgcaagcgtactgtcggcgatgctgccggcccaggttggtgcaccgatctggtcggcgacgatgcgcatctgcggcttttcctgcagcaggcgttgcatggtcagcaggaagttcttgccgtggttggagtagacccaactggtgcgcaggatcaggtactcgccgcccacggccgcaatcgcctgctcgccggtcagcttgctctggccatagacgcccagtgggttcggggtgtcggcttcgatgtagggcgccggtttgctgccgtcgaacacgtagtcggtggaatagtggatcagcgggatgcccagggccttggcttcctcggcgagaatgccgggggcgatggcgttgatggcaaatgcggcgtccggttcgctttcggcctgatcgacagcggtgtgagccgctgcgttgataatcaggctggggcggtgggcgcgcacttgctggcggatctgctctgcattggccaggtcaagctggtcgcggcccaggacgatgagttcgcccaggccctggaggcgttgttgcagttcgcgggagacttggccgtgttggccacagatcaggatcttcatgggaacaagtcggcttccttcaggggtttaccggcctggtccttggcggacaaccggggcgcttcggtcagctcccaatcgatggccagcgtcgggtcattccacaggatgctgcgttcggcgctgggctggtagtaatcggtggttttgtacaggaactcggcgtgatcgctcagtaccacgaacccatgggcgaaaccttccggcacccacagctggcgattgttctgtgctgacagccgcacgccgacccactggccaaagttcggcgagctgcggcggatgtccacggccacgtccaacacttccccggcgatgacgcgcaccagtttgccctgggtgtgttcgagctggtagtgcaggccccgcagcacgcctttttgcgagcgcgagtgattgtcctgcacgaagtcacgcttgagcccggtggccgcttcaaaggcgcgggcgttgaaactttcgtagaaaaagccgcgttcatcgccgaacactttgggttcgaggatcagcacgccgggcaaagtggtttcaacgacgttcactggttctctccggccagcgagtacaggtactggccatagccggtcttgccgaagtacttggcacgttccagcaggtggtcacggtcgatccagccattttcgtaggcgatttcttccaggcaggccactttcaagccttggcggtgttcaatggtctgcacgtactgcgaggcttccagcaagctgtcgtgcgtccccgtatccagccaggcaaagccacggccgaagcgctctacctgcaggtcgccgcgcttgaggtaggcgttgttgacgtcggtaatctcaagctcccctcgaggcgaaggcttgactgccttggcgatcttgatcacgtcgttgtcgtagaagtacaggccggtcactgcgtagctggacttgggcttcgcaggtttttcttcgatggacagggcacggccttcgctgtcgaagtcgatcacgccgaagcgctccgggtccttgacccagtagccgaagacagtagcgcccgtcggccgcttggcggcgccgagcaattgctcgccgaagtgctgaccatggaagatgttgtcacccaggatcaggcacacagggtcatcgccgatgaattcctcgccaatgatgaaggcctgggccaggccatccggggttggctgttcggcataactgaaacgtacgccaaactggctgccatcgcccagcaggttgcgatactgcggcaagtccaccggtgtggatatcaccagaatctctttgatccccgccagcatcagtaccgagatcgggtagtagatcatcggcttgtcatacaccggcagcagttgcttggacacgcccagggtaatggggtgcaaacgcgtgccggagccgccggccaatacgattcccttcatcatgcaatcagatccttaaggtcggtgttgcccaaacgttcaccctggtaactgccgtcctggaccctgcggcaccattccaggttatccaggtaccactgcacggttttgcgcagccctgtttcaaaggtttcttcgggggtccaacccagctctcgctcgatcttgcctgcatcgatggcatagcgctggtcgtggcccgggcgatccttcacgaaggtaatcaggtcggtgaactgctcgacaccagccgggcgctgtggcgccagttcttcgagcagggcgcagataccacgcaccacgtcgatattcttctgctcgttgtgtccgccgatgttgtaggtctcgccgaccacaccttcggtgaccactttgagcaatgcgcgggcatggtcttcgacgaacagccagtcgcgcacctgcaaaccatcaccgtagaccggcagcggcttgcccgcgagggcattgagtatcaccagcgggatcagcttctcggggaagtggaatggcccgtagttgttcgagcagttggtcagcagcaccggcaagccgtaggtgcgctgccaggcgcggaccaggtgatcggacgccgccttgctggccgaatacggtgagctgggtgcatagggtgtggtttcagtgaacaggtcgtccacgccatgcaggtcgccgtacacctcatcggtggagatgtgatggaagcggaacgcgcgcttggcgggctcgtcgagcgtctgccaataggcgcgggtggcttccagcaagctgtaggtgcccacgatattggtctgaatgaagtccgacgggccatcgatcgagcggtctacatgggactcggccgccaggtgcatgatcgcctggggctcaaagcgcttcagtacggcactgacagtggcctggtcgacaatatcggcctggacgaactcgtagcggctgttggacgcgatgctggtcagcgattccaggttgccggcatacgtgagtttgtccaggttgagcacttcgtgctcggtgtgttgaatcaggtggcggattaaggcagagccaataaaaccggcgccaccggtgatgagaatgcgcatgtcagagggccttttccttagacggacattaagcgaatggagcatagcttgagttgtgacgccgagcggtgcaagcgtggtttgcgcagggggttgcgtaagccccctgaacaatggcgatatacacccctaaaaaccgaggccacccccatgttgctcgccaccctgatccatcgcgccagtctaccctgcccgcaagtcagccccgatcaggcggctcgattgcttgagcagtattacggccttagtggcacgttgcgatcgctgggcagccagcaagaccttaactacaaagtcgacagtccccgtggtcggttcgttctgaaaatctgccggggcgactacgctgccttggagcttcaggcccagcacgcggcgctcaacagcctgcaggcggtgcgcgtacccaaggtcatcaaggccctgacaggtgaggaactgctgaccctgaccctcgacggccaaaccctgcatgtgcgggtgctggactatatcgacggccagccgttgacccatctgccccacttggggcgcagggtgatcgcaagctttggcgacctttgcggtcggatgagccaggcgctggcgtcgtttgaacatccgggcctggagcgtacgttgcaatgggacccgcgccatgccctggaattgatcaggcatctgctggcaaccctggaagatttgcctcaccgccaagcgctggaacaagtggctgagcaggtccaggaccgtatgcgtcccctggccgaccacctgccgtggcaagccgtgcacatggatatcaccgacgacaatgtggtgtggcagcgtgatgcgcaacgccactggcaacttcagggcgtgatcgatttcggcgacctggtgcgcacctggcgcattgccgatctgtcggtgacctgcgccgcgctgctgcaccatgccgagggcgacccctttgctatcttgccggcggtccaggcttgccatgcggtgacgccgttgcagcatgaagaattacaggcgctatggccgctgatcgtcgcccgcgcggcggtgctggtcttgagcagcgagcagcaacaacggctggatccgcataacagctacctgttgaaaaatgccgggcatgagtgggaaatcttccatgtagcgacctcggtgccgtttgagctgatggaagcggcgattctcagcagtgttggtcaggcacccacacccgtcgccagccaaggctttgctcctttgttgccggggttggtaggccgcgagttcgcgctgatcgacctgggcgtgctcagcccgcatttcgaggccggcaactgggagcaacccggcatcgatcagcgcctgttgcaggaggcggcggcggtgcatggcttggcggcgagtcgctatgggcagtaccggttgtcgtgtactcggcccgacagtgcgaccgagccggagacgttcccgttgcacgttgaactgcacgtgtcgttggcgacttccgtcgaagcgccgtttgccggtgtggtgcgacggggggccaatggcgaactgcaggtgcataacagcgaagcgaccgtgcggctgtggggtgtaaagccgcttttgcagccgggggctgcggtgctcaagggccaggtgatcggtgaggtcgaggggccgctgacggtacagctttgccgggctgacttgcccgcaccgctgttctgcgcaccgtcccgggcactggcgtggcaagcactgtgcccatcgccggctgcgctgctggggctggcctgcgacgccgagcccgagctggaccccgaggccctgctggcccggcgcgacgccagtttcgcccgttcgcaaaagcactattacgtcgacccgccgcgtatcgagcgcggctggcgcaaccacctgatcgacatgcagggccgctcctacctggacatgctcaataacgtggcggtactcggccacggccacccgcgtatggcggcggtggcggcgcggcagtggtcgttgctcaacaccaactcgcgctttcactatgcggcgattgccgagttttccgagcgcttgctggcgctggcaccggagggcatggaccgggtgttcctggtcaacagcggcaccgaggccaatgacctggcgatccgcctggcctgggcctacagcggcgggcgcgacatgctcagtgtgctggaggcctaccatggctggtcggtggcggcggatgcggtgtccacctcgattgccgacaacccccaggccttgagcagccggccggactgggtgcacccggtgacggcgccgaatacctatcgcggcgagtttcgcgggcaggacagtgcgcccgattacgtacgaagtgtggagcacaacctggcgaaaatcgctgcaagcaaacgccagttggccggtttcatctgtgagccggtgtacggcaatgccggtggtatctcgttgccgccgggctatttgcagcaggtgtatacgcttgtgcgtgcccaaggcggcgtgtgcatcgccgatgaagtgcaggtgggctatggccgcatggggcacttcttctggggctttgaagagcagggcgtggtgcccgatatcatcaccatggccaagggcatgggcaatggccagcccctgggggcggtgattacccggcgtgaaatcgccgaagcgctggaggctgaaggttatttcttctcgtcgtcaggaggcagcccggtcagttgtcgcatcggcatggccgtgttggatgtgatggaggaagaaaaactgtgggaaaacgcccaagtggtcggcgggcatttcaaggctcgcctggaagctctgatcgagcgccatccattggttggcgccgtccacggttccgggttttacctcggcctggaattggtacgcgaccggcaaaccctggagcccgccaccgaagaaaccaccttgttgtgtgatcgtctgcgggagttgggaattttcatgcagcctaccggcgactatctgaacatcctcaagatcaagccgccgatggtcacgtcgaggcgcagcgtggacttctttgtcgacatgctgtcgaaggtgctggatgagcaattgtgattaatcgattgttatcggttatttgctgtcatatttaccgcctatgattttctgttgcttttaaagccgatttttatccgttataaagtcggcatttaccccattcggagccctgaccgccatgaccaccctgcacagtacccctcgcgccgatggcttccacatgcccgccgaatgggcgccacagacgcaaacctggatgatctggcccgagcgcccggacaactggcgcctgggcggcaagccggcgcaggctgcccatgtggcggtggccaaggcgatcgcacgttttgaaccggtgaccgttgccgtatccgccggccagtacgaaaacgcccgcgcccgcctggatgtgccgaatatccgcgtggtggagatgtccagcgatgacgcctgggtgcgcgacaccggcccgaccttcgtgatcaacaacagcggcgaagtgcgcggcgtgaactgggatttcaacgcctggggcggttttgacggcggcttgtatgcgccgtggaaccgcgactcccaggttggcggcaagatcctcgagatcgaacgcgcgccgcgctaccgcaccgaaggttttgtgctggaaggcggttcgatccatgtcgacggcgaaggcaccctgatcaccaccgaagaatgcctgctcaaccgcaatcgcaacccgcacctgggccgggccgagatcgaagcagtgctgagcgccaacctggctgtggataaaatcatctggttgccggatggcctgttcaacgacgaaactgacggccatgtggataacttctgctgctacgtgcgcccgggcgaagtgttgctggcctggaccgatgacgcgcacgacccgaactacgcgcgctgccacgccgccctggacgtgctgcaaagcagcaccgacgcccagggccgctcgttcacagtgcataaaatgccgatcccggggccgctgtacgccaccgaggaagaatgcgccggtgtcgacccggttgacggctcccaggagcgcaatccgaccgtgcgcctggccggttcctacgtgaacttcctgatcgtcaacggcggcatcatcgccccaagcttcgacgacccgctggacagccaggccaaggcgatcctgcaggacctgttcccgcagcacgaagtggtgatggtgccgggccgcgaactgttactggggggcggcaatatccattgcctgacccaacaacagcctgctccgcacaaaaattgagtgcagttgtaacagtgctttaaccggagccaggggctatctggttcgagcgcttacagcaagcccgcggcccagcaaggtcgcgggcttttttgtgtgcgtatgcctataaacacgagacattggcatagctcttgtatcggtgtcgtcacagtggcccaagttaatgactgcgcagttctgtcataaaccttgagtaagttagccgctcacgcagtaggagagagcgctgaaatgaatgccgatatcaacctgatgtacacgcgcacgttccaccccttgcgggtcaacggcgacgcgatccatgcgctggcgctctggttgaaggaaaacggttcgcgacagatcaggcaacagcctgacttgcgcagcgtgatgagtaaacgctatccggcggggttgttcagtgaggatgaagtgcacgcgttgtgtgacctgctgaaaaactaagcaacacagagaacaaatgtgggagggggcttgcccccgatagcggcgtgtcaggcaaaaatatcaaccgaccggttgccatcggggggaagccccttgctacaccttttggatgtattcggtttagaaactgtaggtcccagtcaccaccacgctgcgcggctctcccggctggatctgcgccacgctggtcgccgacgcatagtagtttttatccgcgatattgttcagcgccgccctcacgtcccattccttctggcggaacccggccaacgcatcccaacggccataacccggcagcaccacggtgttgagactgtcggcgtaacgatcccccaccagcgtcaaaccggtttcggcgtaccagcccatttctggtttccaggtgataaacaggctgccgttgcgcttggccacatcactgacgcgcttgccttcaaagccgttgttgtccttcaccaccgtggcgtcctgcaggccgataccgccgcgtacgtaccagttgccgacgatcttgccggtggcagtcagctccacgccgcgtgagcgttgcaaaccgctgagcagggtgatggtgcggtccagcgggtcgctggtgcggcggttgtagagttccagttcgtacaccgccagggtggtgctcaggcggtcgtccagccagtcgctcttgaccccgatttccttctgtttggtcagttcggggctcaggtcgttggcgccgctggtggcgctcggggtgatgccgatcaggccgccgccggctggggagaacgtcttgctccacgaggcgtagaacgagtggttttccaggggcgtccacaccaggccgatgcgcgggctggcgttatggctgtcgacatcttgctggaggttgttgagtttgttcttggtatcgacttcaaagcggtcgtaacgcaggccagccaggagctgccattgatcgttcaggcgcagttggtcttgtatataaaccgcacgactttccacttcggtgtggttgttgctggatacgctcatccgcccggtgtggctcaggtggcggttgggctggttgaggttgaggctcggcacggtgttgccaccgttgtagagcttcggatcgcggcgttggctgcccatttcgacgccggtgagcaggcggtgttccaggccgaaggtgctgaagccgccttccagttcgacgttgttgaagaggttccgcgtggtcaggtcttgctgccagcgctggcgtgtcacgctgttggtcgcaggcacgtaggcggtctggtaggtgttgtcgaaatcactgtcgagcttgaacacgcccagggtctggcgcagttgccagttgtcgttgagctcataggccagcttggagcgcagggactgggatttgtcgtcgatgtagtcgcggctgtcgccgtaggtggtgctgcggctcacatccgccggccggccgttgaccccgggaatgccacggtccggcgtgcggttgtagcggctgtattcgtattgcaccagccaattcaggtccggcgtgagctgccagctcatggacggtgcgaacagctggcgattgccgctgacgccatcgcggaagctgttgttgtcctggttgcccatgttcaggcgcaggctgatgttatcggtggggtcggtgctgaggtcggcatacaggctgcgcaaatcgttgctgccgccttgggcctcgatactcgacttgtggccggcggtaggcagtttgctcacacggttgacgatccctccctgaccgcctcgcccgtagagtacggcagctggccccttgagcacttcgatgcgctcgatgttgtgcaggtcgcgcacgtactggctgtcatcgcggatgccatccaggtagaagtcgttgctcgcatcgaaaccccggatgcgcaggctgtcgaagcgcgtgtcggcgccgctgctgacgttgggaatgccgctcaacgcctggcccaggtcattggtgccgtaggcgcgcaggctttcggtcttaaccgagtcgatggcctggggcacataacgcaccggcgtagcggtgcgggtggcggtgctggtttccttgacgcgtgggtcgtcttcgtcagcttcggcgctgatcgaggtttcgggcaaggtggtggccgcacaggcaaaaccggcagacagcagaacggaaagcccaagggtgatgggcgtcaggcgaggggcaggcattaaggaatgtatccgaatggtttgggaggaaaactacgcgttaatggtaatgctttgcatttgcgcgcgttatcaattgccaaacgtatcggcttttaaatatgttacggaatgtgttttttgccgttttgcatgcggttttttgtcgctttcaatgtggttgtaggcctgcgcttagaattatttcgcctaaatacagacgattcgcgaaattgacacatagttccgggcgcgactaggattgcgcccaacgcctgtggctaaccgccatgactcatccaataaaaaaggcccgcggcatgttcagtcgtccgcgggccttcttttttccggattcagtcgacaccagaaaaagcattacggagcctggtgtcacagcgcgtactcaaccaggaataaggaatacaagaaaatgttgaagcaacggatgagtctgatcgctctggggattttgagcgcatcgacagcaatggcaaacgaccaggaccagtccaagggttttatcgaagacagccacctgaacatcgccgcacgtaacgcctacatcagccgcgactacaaaaacggcaagcaagacaaagccgaatggggccaaggcttcatcggcaagctggagtccggtttcacccagggcaccgtcggtgtgggtgtggacgtgatcggccaatacgctatccgcctggacggtggtaaaggtcgcgctggcgcgggcggtatcgacttcttcaaaccgggtaatggcactgccaacaaccctggctcggcaccacacgacctggccaaaggcggcgctgccgtgaagttccgcgtttccaacaccgtgctcaagtacggtgatcagttcccggccgtgcctgtgctgcagtacgacaactcccgtctgttgtcggaaacctacaccggtacctcgatcgtttccaaagagatcgccggtctgcaactggacgcgggtcacttcaccaaagaagcgcgcaagagcacggaaggcaccgacagcggtcgcctgaaaagcatcgactacatcggtggtagctacaaattcaccgaaagcctgtctgccgcgctgtacgcctccgacatgcaggacgtgctgaagaagcaatacgtcaacgtcaactacgtactggccctgccagagaagcagtcgctgacttttgacttcaacggctacaaaaccaagctggacaagagcttcgccctggaaaaccaaggcagtgaagacgcgcgcgacaacaagatctggagcctgggcgcgacctgggccgttggcccgcacagcttcaccgttgctcaccagcgcagcaccggcgacaccggctacctgtacggcggctaccgcaacgctggcggcatcggcgacggtggcaacaccatcctgctggctaactcctactggtccgacttcaacggcaaggacgagcgttcgtggcaagtgggctatggcatcgacttcgccaccttcggcgtgccgggcctgacctacaacgttgcctacgtgcgtggtaccaacatcgacgacggtaccaaccgcggcgacggcaccgagcgcgaaatctggaaccagttcaagtacgtggtccagagcggcccggccaaagacctgagcctgcgcgcgcgcgcgtcgtggttgcgcgtgtccaacaacgccagcaactacaacgtaggcggtaacgaaatccgtctgttcgccgactacccgatcaacgttttctaattgatccggcgtcgcgcctgagtttcaggcgataaaaaaccccgactggttcggggttttttatgcccgtctgtgcagggcagacttgttacatcgaatcactaatgaagtacccgtgcccacctttatcccctcccggcgcaagcctaaattggccccactgcctgcccgtcaccccgatggtcggccactggagtcttcgccatgccctttgtcagcctgcgcattacccgtgacggcgttaccccggagcaaaaagcccaggtcatcgccgaattcactgaaaccctcgaacgggtcctgcacaaacgcccggacctgacccatatcgtcatcgaagaagtcgacaccgataactggggctacgccggcatcaccaccaccgaataccgcaaatcccaagcctgaatccctaccggagcatcatcatgaaaaaagtcgtcatcatcaccggcgcgtcccaaggtatcggcgccgctgtggtccaggcctaccgtgccctcgattatcgcgtggtcgccacctcgcgctcgatccagccgtccaccgaccccgacatcctcaccgtcgccggcgacatcgccgatccggccacggcccagcgcatcatccgcgacaccctggccaccttcgggcgcatcgacagcctgatcaacaacgctggcatcttcatcgccaagcctttcacggattacacccaggaggactacgccaacgtgctcgcggtgaacctcaatggtttcttctacatcacccaactcgccattgccgaaatggaaaaacacggcgccggccacatcgtcaacgtcaccaccagcctggctgaccacgccattgacggcgtgccgtcggtactcgccaacctcaccaaaggcggcttgaattcagcgaccaaatccttggcgattgaatacgccaagcgcgggattcgggtgaacgcagtgagcccggggatcatcaagacaccgatgcacggcgcagaaacccacgcggcgttggggcaattgcacccggtcgggcacatgggggaagtgagtgacatcgcccaggcaatcgtctacctggaaaccgccggctttgtgaccggtgagattctgcatgtagacggcgggcaaagcgccgggcattgatacacacgtcccggcctaacccggccgggcgttgtcatcccgtggcgagcggccgaaaaaggctttgtaagcccggctgaacgcggcctcggacgcgtagccaatcgcgaagcccacttccccgatgcggccgtcctgtttggccagcatggtttttgccagggtcagccgccattcattctgataccgaagcggcgagcggccgaccaaggcgctgaagcgttcgcagaagttagacctcgacatgcccgccacctcggccagattgtcgatgcgccattgcttgcctggtgtttcgtgaatggctttcagcacgcgcgcgatacgcgcgttcgacagtccacccaaccatccggaagcggcgccctggtgcacccaggtgcgcaggatgcgaatcaccaccaggtcgatcaggcgcgaaatcatcaacgcgccgcccggttgcgtgtcgtgagcttcgagcaacatgaaatgcagaatgccttccgcccacgcggcggcgtcggcttgctggatatggatcagccgcggcagggcgaacagcatggcctggaagctgctcgcgtcgaaccagaagcggcagatgaccacggttgccggcccattcagggcggtcagcgtaatgcccttggggtcgtggggcagcaggatcacatcgccttgctgcagcgtcaggggtggctgatgggcaacgttcagatgcaaccgaccgtgctggagcacgcagatgtgcgcgcttttttcatccagcgtgaggggctgtgcctccgtcagcgtgcaggaatagacccgatcacctgtcaggcggatctgcgccagtacctgggacagcaggtcgcccttggccagcccttccagctgcatttgtggatgaatgatcaagttttccaggggattcatcatgtcggttcgaccccgccctcactaagctgaccgccgagatcatagcgcgccggcgccatcgggatgagcctttcccgcgctgaccgtttttgcacatcatccaaccacatgggaacaccactatgttcggaatctccgctctcggctggctgcacaccctcggcagcttgccggccattccactggccgcctacatgtttatccggcatggccgcatcgtgccgcgctcagtgccgggcgtgttgtattttgtgtcgatgttgatcggcggcctcaccgtgttcctggtcgcgcatcagcccgtcagcaacgccatcggcatcattacgattacgctgctgttggcgggttatggggtagggcgcgtggcctggctggggcaagcccgggtgtatgtggagacgatcttgctgagcctgacggcttttttcctgatggtgcccaccgtgtccgagacgttgcgtcgcgttcccgatggccaccccttcgtcactgacctgaaatccccggtgctgctgggtgcgcaggcaggcattgcgttggtgctggtgatcggcgtgacggcgcaaatgttgtacctgcgcaggcaatcgcgcctcagcactgcccaacactgaaaaaccgggcagaaactgcccgctttcatcgcccaacaccgtgtagccgcccatgaagtcggaggcagcaatcgtcacgcaagtcgtttcgaccacacagcctgggacaccaatatgggtgcagtagacgtgatgccttgaagggtgacaagcaggctgcgccctattaccagcgtcaaataagtggctgattttgtcgcttgttgccgtttagcggcaaattagacaattcattgacagtctcttttggatccaccatgatcgccacgaatttgatggctctaagccattaaaatgacattagcaacgcgcattcgtcccatgctgtggttcttcaagattcagggataaggcggcttggactcggatggccaggcgacgttggtcagggtagccctaaaacactgtcacctttaattagcaggctcgtttgtcgctgcctgcgctcgggtctttaggaagtaaacttcatggctgtaggacgaattctggtcaccggtggtgcaggttttattggttcacatctggtcgatgcgttgctgggcaaaggctacaagattcgcgtattggacaacttgtcgaccggtaaggtggctaacctgcccgccggtaatcctgatctggaactgctggttggcgatgtcgccgacagcgccgtggtcgagcaggccatgcgtgattgcagcgcagtcgtgcatctggcggcggttgcgtcggtgcaggcctcggtagacgatcctgtcgccactcaccaggccaatttcgtcggcacactcaacgtgtgccaaagcatgctcaaggccggtgtggcgcgtgtggtgtttgcctccagcgcggcgacctacggcaacaacggcgaaggcacggccatcgccgaagacacgcccaagtccccactgacgccttatgccagcgacaagttggccagtgagtattacctggacttctaccgtcgcgagcatggccttgagccggtgatcttccgctttttcaatatcttcggtccacgccaggatccgtcttcgccgtactccggtgtgatcagcatcttcaccgagcgcgcgttggcgggtaagccgattaccgtctttggtgacggcgagcaaacccgcgacttcgtctacgtgcaggacctggtgagcatcctcgtccaggcagtcgagacccgcgaaccggcacctgaagccatcaacgtagggctcagccgttcgaccagtctcaacgacctgatcgctgaactgggcaatgccaccggcaccgcgttgaacgtgacctaccaagcttcacgtcaaggcgacatccgtcattcgcgcgctgataacgcccgtctgctggagcgctttgcactcccgcaaccgacctccattggccagggtttggcgcagcttttgcgcagtttgtagctcgccggtcacttcgcccgacgtctacgcagtatcggctcagtcatcttcaagagtgaattatggaaatcgttttccgcaggacgcgtatccgcgcgatcgctgagcggctgttggctgctcttgccttattcgtcggcgggccgagcgtgcacgctgctgccttggcccaaccgaacagcgtggctttctggtacgccgagcaaccaccgctgccggaactggcgcagttcgactgggccgtggtcgaaccggggcacatgacgcctggcgatgtgaaaaccttgcgggcgttgggcagccagccgtttgcctacctgtccatcggtgagtttgacggcaataaggctgaggtcgagaaagccgggttgagcaaagcggtttcccctgtgcggaatgacgcctggaacagccaggtgatggatctcacctcgacggtctggcgcgagcatctgttcggacgtgccaaggccctcgaagcgcaaggctatgcgggcctgttcctggacaccctcgacagtttccaactgatgcccgaggcttcgcgcgagagccagcgcgtcggcctggccagcttgctgcgtgagctgcacaagcgtcagccgaacctcaagctgttcttcaaccgtggtttcgaagtgttgcctgagctggacggcgttgccgccgccgtggcggtcgagtcgatccatgccggttgggatgcttccgccaaacgctatcgcccggtgtccgagtccgatcgccagtggctcgaaacccacctgcaaccgctgcgcgccaagggtgtgccgctggtggccatcgactacttgccacccgagcgtcgtgaggaggcgcgcacgctcgccaagcgtctgcgcgatgaggggttcattccctacatcagtaccccggacctcaacaccctgggcatcagcagcatcgaggtgcagccgcgccgtatcgcgatgatctacgacccgcgcgaaggcgcgctggaagatgccgccggccatagcaacctgggcggattgctggagtacctcggttaccgagtcgattacctgcctgccgacagtgacctgccgctctacggtttcagtggcttgtacgcgggtgtggtcacctggatgaccagcggcccgccgcaggatgcaccggcgttcaatcgctttatcaacgcccgtctcgacgaacaggtgcccgtggtgttcttcagtggcctgccggttgaagacaagttgttgctcaagcgcctgggcctcaagcgggatgcgccgcccgccactcaagtgttgaccatcacccaccaggacaaggccctgctgggcgcattcgaggcaccggtggtgccgcgctcccgtgacctggcggcggtctctgtattgcccaacggcccaaccccggcgttgtccttgagcggtgccaatggcgctgttttcaacccggtggtggtcggtaaatgggggggcctggcgctggcgccttacctgctcgaaatcaacaacgagcgtagccgctggattcttgatccgttcgcgttccttcaggccagcctgcgtctaccggcgcaacctcggccggacaccaccaccgagaatggccggcgcattgcgaccgtgcacatcgatggcgacgggtttccctcccgcgccgaagtgcgtggcacgccctatgcgggtcgtcatacgctggacgattacatcaagcccaacccgttcctgacctcggtgtcgatcatcgagggcgagatctcgccgcgcggcgcgttcccgttcctggcccgcgagctggagccgattgcccgtgagatcttcgccaaccctaaagtcgaagtggccacgcacacctacagccacccgtttttcatgcagccggagaaagccaagaagcgcgagaatttcaacgcggaatacggcttgaacatgaaaatcgtcggctacgacaaaatcgattttcgtcgggagatttttggctcgcgcgattacatcaaccagaacctgacgacgccacagaagccggtgaagatggtgttctggccaggcgatgcgctgccatccgccagcaccatcaagctggcctatgacgcgggcttgaaaaacgtcaacggcgccgaaaccatcatgaccaaggccaacccgtcgctgaccgggctgaacccgttgctgcggccgacgcttggggggttgcagtactacgcgccgatcatcaacgaaaacctctacaccaacctgtggaaaggcccgtactacggcttccgtgagttgatcgagacgttcgagctcaccgacagcccacgccgcctgcgcgggctgcacctctactaccacttctattccagtaccaagcaagcctcgatcaaggccatgcacgagatctacggctacatgcgcgagcaacagccgatgtcgttgtggatgagcgactacgtcgaccgtctgcatggcttgtaccaggcgagcctggcccgtacggccgacggcgcctggcagattcgcgggatggacgcgctgcgtaccgtgcgcctggatgcacaaatgggctggccggacttgctcaaatcccaaggtgtcgcgggtgtacgtgacttgccgcaagggcgctatgtggccctgagcagcgacaaggcgttgctcgcattgcgtgcggacagagatccccgtcctgcgctggaggaggccaacgtgccgttgctcgattggcgttacctggacgatcgtcgcgtgagcttttccttcgccggtcagttcgacctgaccttcaccgtgcgctcggcaaccgcctgccgcgtggaagtcgatgggcaacgattcgcgggcaaggcttcggccggcctttggacttttcaacttcctatgaagcaggtgagtaatggtcaactcctctgcaactaaaagcagccgcctgctcaacccatgggcactggcggtggtcgcggtcgccgtgggcggcctgctgtgggcaaccttccagcgtgaagaagtgttccagcctgacgggcgcgaacccgacgccgtgtcggccaactatgccgagctgttgctgacggcgcacccggatgacgaccacctgcgtttgcaattggtcgacttgttgattcgcctgggtgactacaccaaggcgcgccaacacgtggacgcctggcccaagccgcagccggagattcaggcctactatcgcctggaactggacgcgctggtcgccgccagtggcaacgacctgattgcgcagcatgcgttggtcgagcgcctgcaaagcttcgatcatcgcaagctgccggtggcccagctgcaaagcctggcgaagctggcgctgaccctgcaggcgccggcgtttgccgccagtgtgttcgaagagatcgcagggcgtgacccggcgcaacgcaccgaggcgctcaaatcagccgcgcagtggtacttggcgggtgagcagcctgcgcgcgcggcagacatctatctgcaactcaagcgtgacgcccagcagccgggcgaacggcgggagtacgcgcaacttgcgttcaacagcctgctctcggccggtcgtgacgagcaggccgcgcaagtgctggctgacgagttgccccagctgaccaacccgcagaccgacgtggcgtggctggagcagggcgtggatatcgccgttgcaaccaagcagttcgacctggcccagcgcgtgctccagcagtggcatgacctggagcctgacaaccgcaagatcctggtcaaggaattccaggtgcgcctgtccatcaatgatctggcgggtgcgtgggaaaccggtcaggagttggtcatcgattacccggatgacaccgagttgctggagcaaatggccaagctcggtgagtggcgcggtgataacgaagccgcgctggattactggattcgcttgctcaaactcaaggaagacccgaaaacccgcgagcacgcctggcgccttgccagcctgcaattcgacttcgcccgctcggtcccgttgctcgccgacatcatgcagcagcgtgcgctcacggacatcgagctggatgcgttgatctacggtcatgaatcccgtggcacaccggccgaagccgaggcatggctgcgcacctacctgcgcaagtacccggcccatcgcctggcctggactcgcttgctgcagaacctggaaaacaccgggcagttcgcggccaaaggcaagctctacaaggactatgcaaaacgctacaagctgaccaccgccgagcgggtcgattgggccagcacggaaatgaagctgtttgatgagccggcggcctgggaagtggtcaagtcggacgactcatccatcgatgatccggaatattggcgcacccgtgccgcgctcgcctgggacctggagcgcgacgaggacttgcgcgtctccctggaaaaactgctgtccctcaacggcaagctgaccagcggtgacgagagccagttgatcaccctgtatcgcaccagcgacccgcagcgcgccttgaagttgatggtcgacagctggcaccgcgcccaggatccgcaacggttggtcgaggcgctgcaactggcccaggagctgcaggagtgggatcaggtcgttaccctgctggaagacgccaagcaatacccgcaggcctacgagcaagcccaggttctggcggtacgcggtgccttggcggtggagcagggcgatccctccgaggccgagcgcctctatctgctgggcttgtcgcgctaccccgatgacaacctgttccgcgagcgtttgacctggctgtatgtcgaccaggccgacacggcaaaactcaagcccctgctggccaaatggcgtgcctatgcacgggcagaccgcctgctctggctgccgttcgccagtgccagccagctgttggggcgcgatgccgaggcgttggcctggtatcgcatgtacctcaagctcagcccgaacgactggctggtgcaggctgcgtatgccgacgcactagacacctccggctaccaggacgccgcccagcgcctgcgcttgaagttgctgcgcagccccgaggccgacaacttgcaaccgtcgtcccaacgctatgcgatctggctgcgcttgatgtcgagcagctactcgccgcagaaggcccagcaagaactgctgaagtggaaagacggttcgccgtcgatgaaacagctgtggttcgaacgcctgctggcccgcctggatgcgaccaaccagcaagcgcagaaagacgactggctggcctgggcgcgcacccaagggctcaaggttgaccgttacgagcaaatccaggaagccttgcgcagccgcaataaagcccaggtcgaaaccctgttggccagcagcgacctgaacccggcgcagcgcgcacaggcgctcagccgtttggggcgtaccaacgaggcactggaaaccagcctgtcggcactgggcgacgaccagccggattcggtgaacgagcaactgcgtcgccaggcggtggagatccacgaagccaccccgcaaggtgcgttgctgtcgtatcagaagcaggatttcggtggcttgtcgtttgaggcgccgcgcctggaaatcgcccacaacctgggtgacaactggtacgccgatgtcgagatggaacacggcaactataaaggcgacgacgtcatctcttcgcgcatcggcgacgagagcaacgcggccctgaccttggtgcgctcggtagaaaacggcagctggaagctgtttgccgacaccagccaacgcaaggacgacgaccgtaacggcctgggcctgtcgcgcatgtggcagttgggcaacagccaccagatcgagaccgggctggactggcatcgcaagagcgacgacagcggcctgatgcgggctttcggccagcaggaccgcgcctgggtcggcggccgtcatggcctgaccgcgcgggaccagttgagctgggaagtggcacagcgctcgttctcgacccgtgccggcgactcgttgggcagtggtcatgcgctgaagctggagcttaaccacacgctggaatttgccgggcctaactggacggtgcgcagtggtgtggattaccagaagaacaacgtgaaggatcgcaacctggattacctctccagcgatttcaaaggcccgatacgagtgcctgatgtcgcgccgcctgagccgggtgacccgatcgagttgcagaccatcccgtcgggcgacctgctgcaaagccgctacgggcaactttacgtcggcacgtcctggcgtcgcggcatccccggtgcgctggtgcgcagcaagccgcaatacacctggctggtggacatgacggcgggctggcagtggaccgaccaaaccttcaactatggcgtcaacacgggcattggtttcgaagtgctgggtgacgacgaactggccctcaccttcggctaccaatctgcgccacaaggcggggatggcaagtccggcggcacgctgggcatgagctacggcgtgcgtttcgggcgctgattacagaatctacgggagaaaaacctatgcaagcaattcgtaacctgagcctggccctgacagtgctgttcgtcgccggctgctccagcttcaccagtgaaaacagccctaacctgccgcgcaacgcgcagtgggggatcgtgccgatgatcaactattcgcagaccccgcaagctggtgagcgcagcgagcagatcctgctcagcgtactcagcagccatggcctgcaaccgcgtgtttacccgaccagcacccagggcgaacaggcgctgatggacgacaacgagcgcctgaacggtgccctggaatgggcacgtgagcagaagctcgattacgtcgtcgccggcagcgtcgaagagtggcagtacaagaacggcctggatggcgagccggcggtgggcatcagcctgcgcgtactcgacgccaacagtggtcgtgtgctctggagcaaaagcggcgcgcgcgccggttggtcccgtgaaagcctggcgggcaatgctcagacggtaatcgacaaactggttggcgcccttcgattcgagtgaacgcaatgaattctccacacatggattacagcctggcgcctcgcgccagcgggccggtgtcttggctggaaacactcctggtaacgggcttggccattggcctcggcttctggctgacccccgaagacccgttgcaaatgcacggtggtttcccctggccaatcctggcgccgctgctgttgggtgtgcgttacggttttgtgcgcggcctgttcagcgccgtgctgctggtggcggcgctgtttgccctgcgctacaccgggcatgcaggttatacccagcttgagccctcgttcatcgtcggtgtgctggtgtgcgggatgttggtaggcgaggttcgcgacctgtgggtgcgccgcctggagcgtctgcagatggctaacgaataccgtcagtaccgcctcgacgagttcacccgtgcccatcagatcctgcgggtgtcccatgacctgctggagcaacgcgtggccggcagtgaccagagcctgcgcagctcgttgctgggcctgcgtgaaaaactgcgcggcatgccggtcgaaggcgacgcattgagcgagctggccgagccgatcgtggcgatgctcggccaatacggtgcattgcgcgtggcgggtttgtaccgcgtcgacgacagtgagaaaaacctactgccccaggccttggcgatgatcggcgtgatggggccgctggagaccgatgacggtttgatccggctatgtctggagcgcggcgaactggtgagcgtacgccaggagctgatcgacgccggtaacgccgcgcagttttccgcgctgcaggcctgcatcccgttgatcgatgccgaaggccgcttgctggcgatcctggcggttcggcagatgccgttctttgcgttccaggaccgcaccttgagcttgttgtcgctgctggccggtcacattgccgacctgttgcgccgcgatccgcaagtgctgagcctgcccgatgcgcacgcccagcaattttcgttgcagctcaagcggtcgctggtagatgtggaacaacacacgttgcccaccgggttgttcgcgttcgagatgacgcgcgccaatgaggaactgtcgcgcttgatggagcgcagccaacgtggcctggacttgcacctggcggtacgcaacaaccgcgaacatcgtctgctgctggtgctgttgccgctgaccagcccggaaggtaccgaaggctacctggcgcggatcggcatgttgttgcacgagcactttggtaccgataccgacctggacagcctgggtgtgcgggtcatgcctttcaatctggagcctggctgtgatcgcaacgggctgcgtaacttcctctacaacgagtgtggcctgaatgatcagcaagtggctgtttagcggcgccgtgctgctggaggcgggcagttgggccagcctgtggctcgacgcgccgcagatgcaccaactgctggtgttcaccttcagccatggattggcctgcctgatgctgtgtggcgccgtatggctgctgttgccggcgcgctaccgggcgcctttgccgtggagcccactgttcattttcagcctggcgttatttgtgccggtgatcggtaccctgggcgtggttgcgtcgatcttcccggcgctgtacctgccgcgtaaacgcgaccagcaagcgtggcagtcggtcggcattcccggcctgccgttccgcgcaaaggcccagacacgcacgccgatcttcgccgatggtggtttgcaggacgtgctgcgccacgcgcccgatcccgatcagcgtctggccgcgctgctggcgactcgccgcatgcctggcaaggacgcggtgcccatcctcaagctagccttgggtgaccccagtgatgacgtccgtctgctggcgtactcgatgctcgacaagcaggaaagtgacatcaacctgcacatccagatggcgctggaacagttggccggcgtcggcccccgaactgccggcccggtgcacagcatgctggcgcgctggtattgggaattggcctacctcggcctggcccaaggcagcgtgcttgagcacgtgctgaaccaggccagcgaacatgccgagcaaggtctggcggccggtgagggcggtgagctgttgctgctggccggccgtattgccctggagcgcggtgaaaacgagcgggctgaggccctcttgcacgaggctgagcgaaacggtctggggccggctcagttactgcctttccatgccgagttggcgttcgaagcgggtcgctatcacgaaatccccgggctgctcgccagcctgccggaagaaacccgtcagcggccaccctttgctgagttggtgaggagctggaatgaatcataaggaaaccaccccgacggctgacatttgcctgctgctggaaggcacctggccgtacgtgcgcggcggtgtatcgagctggatccaccagatgatcctcggcctgccggagctgactttttcggtgatgttcatcggcggtcagcgttcggcgtatacctcgcggcgttatgaagtgccggtgaatgtggtgcacatcgaggaggtgttcctcgaagacgcgacgcaccccgccgatacccgtggcacaccccgcgatgccaacccgcagcagttggccgacctgtatcgctttttgcaccacccggacccgcccgagcgggaactgggagagcgcctgctcaactgcatcgccgagggccatatgaccctggatgatgtactgcgcagccgtgccagttgggaaaccctcagcgaaggctaccgccagcattgcgccgacccgtctttcgtcaactatttctggacgctgcgttcgctgcagtcgccgttgctgatgctcgccgaggcctcgcgcaagatgccgccggcgcgggtgctgcactcgatttccaccggttacgccgggctgctggggtgcatcctcaagcaccgctggaaatgcacttacctgctgagcgaacacggtatctataccaaggagcgcaagatcgatctggcccaggccacctggattgccgaaacctccgggcaggcgctcaaccgcagcctcgacgggggctcggggtatatccggaccctgtgggtgcgctatttcgaacggatcggccaactggcctacaacagcgccgacaagatcattgccttgtatgacggcaaccgtcagcgccagatcaaggacggtgccgatccgagccgcacggcgttgatcgccaatggcatcgacctgtcgcaatggtcccgtgccatggaaacccgggagccgggcattgcgcccgttgtcgggttgatcggccgcgtggtgccgatcaaggacgtgaaaacgttcctgcgtgccatgcgcggcgtgatcagtgccatgccgcacgccgaaggctggattgtcggccccgaggaagaagacccggaatacgtgagcgaatgccgcagcctgatggcgagcctggggctcgaaggcaaagtgcacttcctgggtttccagcgcatccaggacatcttgcccaagctgggcctgatggtgctgacctcgatcagcgaagcacaacccttggtgatcctcgaagcctgggccgccggtacgccggtcgtcagcagcgacgtcggctcttgccgcgaactgatcgaaggcggcagcgccgaagaccgcgacctcggcgtggcgggcaaggtggtggcgattgccgacccacaggcgacgtctgccgcgatcctcgaactgctgcgcagccccgagcgttggaaagctgcacaggccgccggcttgctgcgggtcaaccgttactacaccgaagccttgatgctgcagcgctaccgcgacctgtaccaggccgccatggagaacagttaaatggccggtattggcttcgaactgcgcaagatcctctcgcgtgactcatacaccgccaccttgcacgcctatgtgtatgcgggcctgatcagctccggcccgtgggtgctgtcgatcatcagcgtgatgctggtggggatcatcagcctgggcctgctgttgcccaacgcattggtggggcagtttctggtcacggtgacgtacctgatggccagctcattgatcctgacgggcggcctgcagttgttcttcacccgcttcgtgtccgaccagttgttcgagcgcaactacgatcagatcctgcccaacctgctgggcatattgttgatggtgacggtcggtgccggggtgttgggggtaatcgtgctggcgctcctgttcgatcaaccgctgatctaccgcgtgctggtgctgtcgaacttcgtggtgctgtgcaacctgtggctggtgatcatctttctttcggggatgaaaaagtacaaccgcatcctgctggtgatggtggtgggttactcgctgatggtcgcgtgcgcctacctgctgagcttcctgaagatgcccggcctgttgctggcgctgttgatcggtcacggcagcctgttgttcctgtacctgtacgacatcctgcgcgagtaccgtgccgagaaaatgattgcgtttgattttctcaatcgtcgcaacgtgttcctcagcctgctagtcaccgggttcttctacaacttcggcatctgggtcgacaaaatcctgttctggttcaacccaggcacgtccaacacggtgataggcccgctgcgcgcctcgatcctgtacgacatgccgatcttcatcgcctacttggcgatcatccccggcatggccgtgttcctggtgcgtatcgagaccgactttgccgagtggtacgaccgcttgttccgtgccatccgcgatggcgagaccttgcagcacattggctcgctgaaaaccgagatgaccctctccatccgccagggcctgctggaaatctgcaaagtccaaggcctgaccgtggtgctgctgttcctcttcgccccgcgcctgctggaatggatcggcatctccagctactacctgccactgttctacatcgacttgatcggtgtgagcatccaggtggtcttcatggcgttgctcaacgtgttcttctacctcgacaaacgccgcgtggtcctggaactgtgcgtactgtttgccctactcaacgcagccctgacactgctcagcatgcacctggggcctagcttcttcggctacgggtttacgttgtcattgctggtgtgtgtactgctggggctggcgcggttgtcgtcggcgctggaagatttggagtatgagacgtttatgttggcgcggtgattgggttttaggtggtgtgagaaaggcacttggcgtttgcggcaagtgccttttttgttgggggccggatggggctttatagggcgcgataacgaacctcgccacaagttgaactgcaccatggcgaggacaggccttttcagtgaggtctaccgcgcgctattgccgggtgactccaacaccttcaccacatcatcaatcaccgccttgctcatctcctgcaaataatgcgaagcccaggcataacggtccgtctcccgcgtcatcgccgcatcttctgcgagcagcttggcgacatggagcaggtcggaaacgtggtgcaaggcttcatgcagggaaacaccgctattgacgcggaacagaggttggtcggagtgaaaggagaagggggtgacgccgagggtggttaacgcagacggacttgtagcggtcattggtaaaactcccatatctggtgagagctaccacgttcgttctcaggcgaatgggtggcagctgtgcgcaggctgagaaaccggagatacaggaacccggcagacccgaaggtctcccacgcacagccgccattgcacgaaatggtgggcgaaaaaaaacgcctgcaaatcgggttttggggcgcttggtgcgcctgcatcttgccgggttctcaggcccgatcgctgaattggcagcgatggaacggagggtagcgtggtgggacgtggggagcaatcgggattattgatgggatgattttcagggcttcattagggtgtgtaggttgctactgaaattattgtttttatggctgggtcataattattggcagttcataatttggaataaaggctgaaagatgaagctttgaggctgaagtgttgttttttaagagggtagcgattggttgaagcgaggggcggggtgtgattcagctatgaacaccccagaaacagcaaagccctcacatttctgtgagggcttcgtcttatatggtgcggcaccaggagtcgaagatatataacagtatgatttttaatgtttttattattttttataggccgctatccctaaaaatatcctttggtgctcgcacgatcccttacgctttcagatcctccactcccaaaaagcaccgaaattgcacaccatgcatgcttcgtgttttcgtaggtgataccgaggacgaatgatggcattctgtacatctcatcagcgccaacccgacattacctatagggacctggatggagttgcagcagaatgaccactgaaaaaaggattttgtgaatgagccttcctcttgtaaacacgttttcgcccccctacgaaaaatgggaaacaaggcatcccaccgttgaggagatgctggcagccagcagtttccatatgcgcgtaaaggtcagactagaggtaacagttgcgaacgcttacgacgcggctatctatatgggccgcgtcggagccgacaacggcctcggggacttcatcaacgcagcgctggatgacagtcccgcccacaagcagtggcgacaagctatgccatccaaaactcctgatgcgctggcgcggtatcagaagtcatatccgaattgtgactttgccaaggtatcggcagagataaatgaaatcgcacaggtgctgagtgaaggtcaatgcctttttcatgcagggctgtggcctgactgtaccacgttagtcacggatcgtcctttatctacatcattttgtccccaggtcgccctgcgaaatgcagaccaccgaagtaaagcatacgacgcaggccgcattgatttgttcgtgctaacagtaactagcccaaaaacgaatgtctttgcttataagcgcaacggtacaaacttaggccatgaaaatgaggttctgttcgccgaaggtgccaatttgaagctggtatcgtccgaagttgttaataccgattaccctgccgcgaaacccggatttcctgataaacgaatttcggttcgcgtaatcaccgttaacgtctcatagttgagcttttcagctgatttgcacagcgtagtgctgcgcacgaaataatatgcgcgtggcattactcagcttgttgatctaacccgacatacgaaatcaactagggcagggcaatgtctgtgaaaaaaattttatgggtgaagtttggctggtctgattattatcgcggcggcccggtcgacggtaattttggttggctcaacaaaaacaagggcaaaaaaaacgaaggacgggggcacgaggcactcaactttaaccctggggctgatggaacctactattgttatgttccgccccaagcaagcgagtatgcaccgtcaaacgatgatccaaatggctggacagtgatttgcctcgcgaaaaatccaaagcacactggcgtccatgttgtcggttggtacgaaaatgccacccttcatggtgaatggcttgatcctccagagagtctgatcaaaaagcgaggggatgctgcgcacccggcctatgactggtcatactgcatctctagcaagaccgcatacttcgttccgcctgagtaccgaactatgcccttctcagatccgtccgtgaggcagggcaaatattccttcctagaaggaccaggcatagacaccaataagaacaaaacgcgcgtactgaaacttctcaacagtcgtctgaaagcgatgagccgattcgctatccagaaccctaacgagggctcgttacccgatcccgaactcgacgcagccgatcctctaaaaggattcggtacaccggagcatcggaaaaacgtggaactggcagcagaatgcgccgtcattgagtattacaaagcaaaaggatatgcctgcgaacgcgttacgcatctaccctgtgggtatgactttgtttttaccaaaggtaaatcagtgcggcacgtcgaggtcaaaggtacatccagtcccactcctcaattctttattactcggaatgagtatggaaagggtctgttatccaatccagcatggcgtcttactatggttacctctgcactgtccgaaactccgagcataactgaatacgatgctctcgggctgaagcaagcgtttgatctagaaccctatgtatacatcggaaaatttatcccgaagtcggagagttagttagccagcctgactgatatagcccattcgctatattattgaggagcccataatcgtttaatgattttcttgactgagcaccccgataccacgtcagcatataaaactatccaccccaatgcccagttaaccccaacaggaatgggaaaggggacggatctattatccagattcaaaatgggatatatgcgcgcagtggtactagcgttgaatacaacattgacttactaacgcgtcgatatcaagccagttcccaccccaaggaaaacccgtaatggatctacacaacgagttcgaaaacagtaaattcttcaaccgggcccgtatcgatcgtcgcgccgccgacgcattggtggggttggccgctggaattacggcggatggtgtcgtgaacatatcggaagcggtttttctaaagcaatggctggaaaacaatctcgcgcatctgaacgatccggtgatcaatctgctgtattcgcgtttggcgtacatgcttcaggacgatgcgctagacgtggatgagtcccaggagttgcttaacattctgcgtggtttttctggagtggacattgagagagcgaaggtcggcggcacagttgccgttactcctacggacctgcccttcaattcaccagcccctgatttggtgtgggatggccggatgtttgtatttacgggtgtcatgagctttgggccgcgcaaggattgtcaggcgctggtcgaagaacgaggtggtttgattgggggcggtgtgagcaagaaggtgcactacctggtggtcggaagcgtgggtaatgagcagtggcgccatagtacctatgggacgaagatcatgaaggcagtggagttgcgggaggcaggagcttcgattgccattgtgggtgaggatcattggcaaaggatgctgtttggttgaggttgctgcgtttttggtgtcttgggaaacgcaggcctttctttggtgagtagatcgtcgctgggtttgatggcctcatcgcgagcaggctcgctcccaagggtttcaggggggacgtttcagaaacaacaaagcccctgcatttctgcaggggcttcgttttgtatggtgccggcaccaggagtcgaacccgggacctactgattacaagtcagttgctctaccaactgagctataccggcgtgttagggcgacgattatagcgattggcaaggttctgtaaacccctgaattctgactatttttgcagaacccgcgctttttccacgctcgcccctttttacagctggcgagtgtaggatttctcccttgccgccgaagggtctaccccggcaaaaatcttctccaaacccaaggaagccccacgtgaaacggactctctcgctgtccctcatcctcctcactgtcgcgctcgctgcgtgttcgtccaacaaacccgccaacgacccggcgctggtgggcacctggaaaggtctgcgcaccgagaccggtaaatgtcagttcctgtcgtggaccaataccctcaaacctgacggtcgttttgtgattaccttctaccgcgatgcgcagcagaccaaggtgatccagaccgagcagggttcgtggtcggcggccaatggcaggaatgagttgcgtaccgacggcgtgcgttcgccggatgtgtacacctataagctgctggacgcagacacggtgcattacgtgagtgtggcgtcggatccgaccagcgattgccaggatgactacgcgttcaccgagcgtcgtgtgcgctaagccttcagaaacgctccgaaaccgggcactcaggtgcccggttcgcgcaagcctcaactgccttctgcgcagttatctgcaaacttcttgtagtccaatacctgttgctgcccgtgggaatccaggtaggtcatgtgcgcattcacgatcccacacgctccgtttgtgtcttcgacagtggtcagcacgcgctggatatccagcttgggctgtacgtcggcgtgggcgttgacggcaaaagccagcaggctgacggcgatcaaggtgttccagttcatggtgggtatcctccgggttcaacaagtgggtgtgggcttattgagcgccctggaggtatctgcactgtgtcatgcggcgcgggttttgcttcgttgtgtagcgagaccttggctgcatacaaagcgatacatcggccgtagccgtgtgggtcatttggatcgaccgctcagccggttttcccttgaatacaggtgcggtttccgtattctgtgccgcgatataaaccgtcagtttaatcgcggtttcgtgtaggcaaattttcgagacaatgtagggcaactgaatatctgttgatgcatatgtcagttttgtgtcgtttttgtccagtcggccaagattttttgtgaaataacgatgcaagtacatgttcttaaaacgaatgggtttttcttcatgaaatcgtcgtaaaaatggcgccaggccgttcgtcggattaaattgaacttaaaacatcaaaatactgacaccatcattgtgatatcacagaatgcgcccgacaccacataactagaaaaaaccaggtcagctccttgctggcctttttatcgcctttataaagcgcaaatcaggtggggaggggcagtgagtgagtcgggcagatgacatttcaaagctattcaacaagctcggtgccaacccgagtggctatcgtgagatcgactttgtccatgagttcatcgaggacgaagtcgaggtcctggaagctcccgcagtcactccagccccgcttgagatcgaagccccctcggcgcctctgctgcgcttgctggaggaactgagccaaggcgaagccgaccacctgcagccgcccgaagtggtggaagggcgggacggccaggtgtactccgagcaatcgagccctaaagtcgtggtgttggtctcggtcaagggcggcgtcggtcgcagcaccctcacggctgcgcttgccagtggcttgcagcgcatgggccgcccggcgctggccctggatctggacccgcaaaacgccctgcgccaccacctgtgcctgggcctcgacatacccggcgtcggcgctaccagcttgcgcaacgaaggctgggaagccctgcccgagcgcggttttgccggttgccggctggtggcattcggcgccactgaccacgagcaacagcacagcctcaatcgctggttgggccaggacagcgagtggctcggcaagcgcctgtccggtctcaagttgaacggccaggacaccgtgatcatcgacgtccccgccggcaacaccgtttacctcagccaggccatgtcggtggccgacgcggtgctggtggtggtacagccggacgtggcctcgttcagcatcctcgaccagatggacagcctgctggcgccatacctccagcgcgccaaaccgccacaacgcttctacgtgatcaaccagctggacggtgcccaccgcttcagcctggacatggccgaggtgttcaagacccgcctgggtgctgcgctgttggggacggtccaccgcgaccccacgttcagcgaagcccaggcctacgggcgtgatcccctcgacccaaccgtcaacagtatcggcagccaggacgtccacgccctgtgccgcaccttgctcgaacgcatcgactcggaccttccatgaccgacactacgtcctccacgcccttcgtcgaagggcgcgccgaacagcgcctcaatggcgccatcgcgcgcttcaaccggtggcctgcggcgctgcgtacggtactggttgtcgccagttgcgtgctcggcgccctgctgttgatgggcattatcagcgcgccgctcgacctctacagccagtgcctgttcgcgggtgtgtgcttcctcgccgtgctggtgttgcgcaagatcccggggcgcctggcgatccttgcgctggtggtgctgtcgctggtggcgtcgttgcgctacatgttctggcgcctcacctccaccctcggctttgaaacctgggtcgacatgttcttcggctacggcctggtcgcggccgagttctacgccatggtcgtactcatcttcggctacgtgcaaaccgcctggccgctgcgccgcacgccggtgtggctcaagaccgagccggaggaatggccgacggtcgacgtgttcatccccacctataacgaagcgctgagcatcgtaaaactgaccatctttgccgcccaggcgatggactggcccaaggacaagctgcgcgtccacgtactcgatgacggccgccgcgacgacttccgcgacttctgccgcaaggtcggggtgaactacattcgtcgcgacaacaacttccacgccaaggccggcaacctcaacgaagcgttgaaagtcaccgacggcgaatacatcgcgctgttcgacgccgaccacgtgccgacgcgttccttcctgcaagtgagcctgggctggttcctcaaggacccgaagctggcgatgctgcaaacgccacacttcttcttttcgccggacccgttcgaaaagaacctcgacaccttccgcgccgtgcccaacgagggtgagctgttctacggcctggtgcaggacggcaacgacctgtggaacgccacgtttttctgcggctcctgcgccgtcatccgccgtgagccgctgctggaaatcggcggcgtggccatcgagacggtgaccgaagacgcccacaccgcgctcaagctcaatcgcctcggctacaacaccgcctacctggccatcccgcaagccgcgggcctggccaccgaaagcctgtcgcgccacatcaaccagcggattcgctgggcgcggggcatggcgcagattttccgcaccgacaacccgttgctcggcaaaggcctgaagtggggccagcgcatctgctacgccaacgccatgctgcacttcttttatgggttgccgcgcctggtgttcctcactgcgccgctggcctacctggtgttcggcgccgagattttccacgcctcggcgctgatgatcgtcgcctacgtgctgccgcacctggtgcactccagcctgaccaactcacggatccaggggcgcttccgtcactcgttctggaacgaggtctacgagaccgtactggcctggtacatcctgccgccggtgctggtcgcgctggtcaaccccaaggccggtggcttcaacgtcaccgacaagggcggcatcatcgacaagcagttcttcgactggaaactggcgcgcccgtacctggtgctgttgctggtcaacctgatcggtattggtttcggcgtgcatcagttggtgtatggcgatgagtccaccgctgtcaccgtggcgatcaacctgacctggaccctctacaacctgatcatcaccagcgccgccgtggcggtggcctccgagacgcgccaagtgcgttccgagccgcgtgtgagtgcgaagctgccggtgagtattatttgttccgacggtcgtgtgcttcacgggatcacccaggacttctcgcagaatggcttcggcctgatcctcgatgatggtcactccatcacccaaggtgaacgggtgaagctggtgctgtcgcgcaacggtcaggacaacctgttccaggcgcgggtggcgttcagcaaaggtacacagattggtgcgcagttcgagtcattaagcctgcgcgagcaaagcgaactggtgcgcctgacgttctcacgcgccgacacctgggccgccagttggggcgccggccagccggacacaccgctggcagccttgcgtgaagtcggtggtatcggcatcggcggtctgttcacgctgtgccgcgccaccctgcatgaattacgtatggccctgcgccgcacgccctcacaaccgcttgatacgttgatggacaagccatgacctccacagcttttttcgcgcgcgctcattcgcgcgccgcacatgcgttgctgatcgcttcgctgctgggcctgagcccactgctgcaagcggccgacaaggcagtgattgctcctgctgccgtgcaaggtgccgagaacggctacagcctgacgctcaagcaactggggcgtcgcgacagcatgaacctgcagggtgtggagtcatctgacagcgtcaacttcgacatccgtgctgaccaggttgtgacgggcgcccaactgttgctcaactacagctattcgccggcgctgctggcggagctgtcgcagatcaacgtgctggtcaacgacgaagtcgccgccagcctgccgttgccaaaagaaggcgccggcaccccgcaacaggccgtcgtgcagattgcgccgcacctgatcaccgagttcaaccgcctgcggttgcagttcatcggtcactacaccatgtcttgcgaggacccgctgcacagcagcctctgggcaaaaatcagcaacaccagcgagctgaaagtgcaggtctcgccgatcctgttgaaagacgatctgtcggtgctgccgctgccgttcttcgataagcgtgatgcgcgccaggtcaacctgccgttcgtgttcgcaactccaccggataacgctacgctggaagcagcggcgacgctgtcgtcatggttcggcgcaatggccagctaccgtggcgctactttccccacggcctacggcacgatcccggccaagggcaacgccattgtgctggtgctcagcccgaatgcggtcgacgtcaatggcgtgaaagtggcgcaagccagcgggccgaccctgagcctgatcgccaaccccaacgacccccagggcaagttgctgatcgtgtcggggcgcgacggcgccgaactcaagcgcgccgccacggcggtggcgctgggcaacccggtgcttgccggcaacagcgtggtcatcgacaaacttgaaagcctggctccgcgccgcccctatgacgcgccgaactgggtgcccagtgatcgcccggtacgtctgggcgaactggtcgagctgaaaaagctcagcgtcgcgggctacaaccctggcccgatcagtgtcgacttccgcctgccgcccgacctgttcaactggcgtgaagaaggcgtgccgctgcacctcaagtaccgctacacgccgcagcaagtgtcgaccaattcgtcgttgctggtggggctggatgaccagttcatgaagtccatgccgctgccgtcgatcaccagcctggcagacggcaagaccctgttgagcatgatgcagaaagacaacacgctgccgcgcgaagccaccgtgttgctgccgatcagctcggcgtcgccgatgtccaagctgcaactgcgctttatgtacgactacatcaaggaaggcgaatgccgcgacatcatcgtcgataacatgcgcggtaccatcgacccggattcgagcctggacatcagcggctaccaacacttcatcgctatgccgaacctgggcgtgttcaacgatgccggtttcccgttcacccgcctggccgacctgtccgagtcggccgtggtgttgcctgacacctttggcaccgacgagttgagtgcctacttgaccatcctgggccgcttcggcgagtccaccggttacccggcgaccgccgtcaaagtggtgcaagccaaggacgtgcaaagtgtggctgacaaagacctgctggtgatcgccaccggtgccgaccagcccttgttcaagcaatggcagcagtacctgccggccacggtcgatggcccgcagcagcacttcaaactgtcggacctgccgcgctacgtcagcaactgggtcagcccggacgccgaagccaacaagcacgcggccaacgccgccatcagcttcaacagcttgagcaccagcacgtggtttgccggtttcgagtcgccgctcaaggtcgggcgcagtgtggtgctgatctccagttccaggccagaaggcctgcaagccgcgaccgctgtgctgattggcggcgatcaatataaagaaaccatccagggcagcctggcggtggtgcagggcacgcaggtcagctcactggtggctgaccagcagtactacgtgggcaaactgggctggttcaagtcggtgcaatggcaactgtcgcaaaacctgggttggatgttgttgttcaccttcctgggcctggcgattgtcacctgcctgatctacctgtccttgcgtgcccgtgcaaaacggcggttggcatgatgcgtccagccgcttgggcctgggtgggcgccgcgatgtttgcgggggcagcccaggcccagacgtgtgatgcgcaatggccgctgtggcagaactatgccacgcgctttgtgcaggatgacgggcgggtgttgaactcgtccctgaaccccagcgagagcaattccgaaggccagtcctacgccatgttctttgccctggtcggcaacgatcgcgcgcgcttcgacaagctgtggacgtggaccaagtccaacatggccggcaatgacctcagccacaacctgttcgcctggctgtggggcaagaacaaagatggccagtggggcgtgatcgatgccaactccgccagcgatgccgatctgtggatcgcctatgcgttgctcgaagctgcgcgcatctggaatgtgccgcagtaccgtgccgacgcgcaatgggtgttggccaatgtggaaaagaccctgatcgtacgtgtaccgggcctgggcaagatgctgttgccggggcctgtgggttattcgtatccgggtggtttgtggcgcttcaatcccagctatcaagtgttggcgcaattgcgccgcttccacaaagaacgcccgaacggcggctggaatgatgtggccgacagcaatgcgaagatgctggccgacccccaaagcaaccctcatggctttgccgccaactgggtgggctaccgcgccaccagcgccaataccggcgtgtttgtggttgacccgtactctgacgatctgggcagttacgacgctatccgcacctacctgtgggccgggatgacggcgaagagcgaccccctcgcggcgccgatgctcaaggcgttgggtgggttgtcacgggcgacggctgcgtcggtcaatggcctaccgccggagaaggtccatgtgctcaccggcgaagtcgagaagaacaatggctactcgccgctggggttctcggcgtcggccatggtgttcttccaggcacggggcgagaccgccctggcgcaactgcaaaagcacaagctcgacgacgtgttgggcaaggccatggcccccgacgcgcccgataccgcgcagccggtttattacgactacatgcttagcctgttcggcaaaggttttgccgatcaaaagtaccgtttcgagcaagacggtacggtcacattattctgggagggcgcatgcgccgccacacgctagcccttgcgatattggccaccctggcgtccagcgccagcctggctgcaaccagcgacccacaagccttgctgatcgagcagggtaactattggcagtcgaagaaaaaccccgagcgcgccctggaaagctggcagaaactgctcagcctgagccccgagcagccggacgcgctgtatggcatcggcctgatccaggtgcaacagcagcacccggaagaggcgcagaaatacctggcccgcctgcgtgcaatttcgcccctgccgcgccaggccttgcagcttgaacaagacattgccgtcaacacccccaccaacgccaagttgctggagcaagcccgtgagctgggtgagccggttgaagatcgcgaaaaggccgtggcgctgtaccgccagattttccaggggcgccagcctcagggcctgattgcgcgtgagtattacaacgccttggcgttcactcccaagggcacggccgaagggatcgccggcctgcaacgtgtcacgcgtgagcgcccgaatgattcgatcgccgcgctgttcctggcccggcacttggcgcgtaacccgtccacccgcgtcgaaggtattcgtgcgatggagcgcctgtcgaccgacaacgacgtgggcggcgccgccgatgagggctggcgttttgcactgttgtggctcggtgcaccgaaccgtgaccaggtgccgttgttccagcagttcctggccaagcatccggatgacactgagatccgtgcgctgatgaacaaaggcattgcccagagcaagggcgatggcggctggcagcgtgatcccaagttggtcaaagcgttcaaggcgctggacgacggtgacctgaaaaccgccgagccgctgttggcggcgcgcctcgcggaaaagcccaacgatgtcgatgccctcggtggcatgggcgtggtgcgccagcagcaacagcgcttcagcgaggcggagcattacctcgggcaagccacacgcctgcctggcggcgctgcctggcaaaaggccctgaacgaagtgcgctactggagcctgctcaaccaggcacgcgacgcgcaaactgccggccgtagcagccaagcccttgacctggcggcccaagccgagcgcttgaacccgagtcgcgccgacgccgccgtggccctggccggcttccaggcccaggacaatcagttcgacgccgctgaagccacgtaccgcaaagtgctggcgcgcaaccctggcgacccggatgccttgaatggcctgatcggcgtgctgtcccaatcgggtcgcccggacgaagcgttgaagctgatcgattcggtgtcgccggccgaccgtgccaagttctcctcgacggccaagatcaaagccatgcgcgccacccagttgggcaagttggccgatcagcgcggcgacttgaaagccgcccaggcggcgtatcagcaagcgcttgatgccgatccggaaaacccctggacacgtttcgcccttgcgcgggtctacctgcgggatggccagatccgcaacgcccgcgccttgatcgatggcctgctcaaaagccagccgaaccagccggatgcgctgtacaccagcaccttgctgtcggttgagctgggcgagtggaaggcggccgacgccaccttgtcacgcattccggtcggccagcgcacggcggatatgaatgagttggcgagcgatatcgccctgcacaaacagacggacatcgctgtcgaaaccgcgcgccgtggtcagcgtcccgaggccttggccttgctcggtcgcagtgccgcgctggccggtaaaaaaccggaacgcctggcggtgctggcgtctgcctatgtcgatgtgggcgcaccggaagaaggcctgcagatcatgcaaggcgtgctggaaaagactccgaacccgaccgccgaccaaaagctgctctacgccagcgtattgctcaaggccaatcactacaccgaagccggcgatatcctgcgtgagttgcagggccaacccctgagcgacgccggacgccagcgctacgaagacctgatctttcaataccgggtcaagcaagccgacgcattgcgtgagaagaacgacctggtggcggcgtacgacatgctctcgccagccctggcccagcgacctaacgacacgtcggccattggtgcactggcgcgcatgtacgctgcgggcggcgatggcaaaaaagccatggacctctaccggccgctggtccagcaaaacccgggtaacgctcagttgcaactgggtctggcggacatcgccttgaaggggggcgaccgtggcctggcgcaatcggctgccgacaaggcattgaccctggaacctacgagtgccgaagtgctgacgtcggctgcgggtatctaccgtggcctgggtcgcaataacgaagccactgaattgctgcgtcgcgcgctggccatcgaaaacacccagcgtgcccaggcgcggtcggccctggcagacgcccagggcgtggcctacaaccccttcgtcggcttgcctggccagcgtcggcaaattaccgacctggcggtggatcgcggcaccgtgccgccgcccatcgatgcgccggccaacgtgatgccagcgccggtcgcggccactgttccgacaaatgccatggcaagcaacggctatgcgccgtcgaacaacttgagtgatccgtttgtgccgccaacgcggattgccgcgctggacaacccgaccttgagccctgcgcaacgggccctcgattcgatgctgcgtgaccgtagcggttacctggtccagggcctgagcgtgcgcagcaacaacggtgaaagtggcttgagcaaaattacccaagtggacacgccgttcgaagcgcgcatgccggtgggcgacatgaacgtggcgttgcgtgtgacgccggtgagtttgagttcggggacggtcaaagccatttcggctgcgcgttttggtgccggcacaggcgaggacaaagccaagcgagaaaacggtgtcggcctggccgttgccgttgaagacacggcgcaaggcgtcaaggcggacatcggcgtgagccccctgggctttacctacaacaccgtggtcggtggcgcgagtgtgaatcgaccgttcaccgaaggcggcaacctgcgctatggcgtcaacgtttcacggcgtcctgtgaccgacagcgtcacctcgttcgccggttcaaaagccaggatcactgacaccgatggcgaagtccacacggacaagtggggcggcgtcaccgccaacggcgggcgtgccgaattgagctacgacgaccaggaggtcggtgcctacggctatgcgtctttgcacaggttgttgggacataacgtcgaagccaacacgcgcatggaattgggcagcggcgtctactggtacctgcgcaacacgccgaccgacaccctcaccctgggcgtcagcggcatggcaatgggcttcaaggacaaccagggtttctacacctatggtcagggcggatacttcagcccgcaacgcttcttctccctggccgtgccggtgcgttgggcacagagcttcgaccgtttcagctatgaggtgaaaagttcggtgggcgtgcagcatatcgcgcaagatggcgccgattatttcccgacggaaaaggacctgcaggaatcgtttgaaaacccgaaatacaagagcagcagcaagaccggcatcggctacagcctcaacgcggctgctgaataccgtctttcttcacgcttttacctgggtggcgaagtcggtgtcgacaacgcccaggattatcgccagtacgtcggcaacgcgtacctgcgctacctgtttgaagacctgagcgggcctatgccgctgccggtcagcccttaccgttccccgtattcgaattgattgataggagtcatccatgcctgtttccgcaattgccggcctgaccctgctggtactcggcgaaagccacctgagcttcccggaccatttgctcgatccgctgcaagccaacctgacggcgcaaggcgccaaggtccacaccatcggcgcctgcggtgccggcgcggccgattggatcgtgccgaagaaagtcgactgcggcgccgaaaacctgccgggcgccaagccgcaggtgttcggcaagaacgccatgagcaccacgccggtcaaggacctgatcgccaaagacaaacccgacctcgtggtgatcatcattggcgacaccatggcctcctacccggacccgcagtttccgaaagtctgggcctggaaaagcgtgacgtcgctgaccaaggccatcagcgaaaccggcaccaagtgcgtgtgggtcggcccggcctggggcaaggtcggcagcctgtacaagaaggatgatgcgcgcaccaagctgatgtcgtcgttcctggcgaccaacgtggcgccgtgcacctacatcgactcgctgaccttctccaagccaggcgaatggatcaccaccgacggccagcacttcaccatcgacggctaccagaagtgggccaaggccatcggcggcgcgctgtcggcattgccggcggatgctgtgaagggagccaagtgatgaagcgcatttccctgggcctggcgaccttgctcgccagcgtcagcgcatatagcgccgacatcccgttgtaccccaccgggccggaaaaagactcggcgttcctgcgctttgccaacggcaccagcagcgagttgaagctggtggccgaagggtccaaggccagcctggtgctgggtggcgacaaacttgtctccgactacctgcccgtgtcgggcggcagcgcgccgatcaaaggggtgttgagccagggcggcaaaaacgctgatttggctgtcactgtcgccccaggcgagttcgctacggtgatcgcggtggctgatgccaagggcggtattcgccaactggtgattcacgagcagccggacgacttcaacgcgctgaaagcctcgctggccttcgtcaatgccgacgccgcgtgtgccgatgccagcctggaagccgtggcgcaaaaggccgagctgttcaagaacgccgccgaaggttcggtgcaacgtcgcatgatcaacccggtggaactgtcggtgcagctcaagtgcgccggtgcgcgaaccggccaaccgttgaccttcgccctcaaggccggcgagcgctacagcgtgctggcaatgccagcggctggcggtacccggttgttgttcgcgcctgacacgctcgctaactgatcgggcccgacaccaccatggtctttgcctcactcgaattcctcacgctgttcctgccggccttcctgttgatctacgcgctggctcgtccgagctggcgcaacgtcatcctgttgatcggcagctggttgttctacggctggttgagcccgctgttcctgttcctgcacatggtgttgaccgtagtggcatgggtcggcggcttgctggtggaccgctcccgtgaggacggcaaaggccgggtgcgcctgttaatcgcattgatcgtgttcaacacggcggtgctgtgttggtacaagtacgccaacatcgtcgccggcacggtgagcgaggtgatcacctggtacggcgcgatgccgctggactggcagcgcgtggccttgccggccggcttgtcgttcatcgtgttgcaggcgatttcctacctggtggatgtgcaccggcatacggtgccggtggagcgcagcttcatcaactacgccacctatatctcgatgttcggccactcgattgccggcccgatcatccgttacgactgggttcgccgcgagctgaaccagcggtatttcaactgggcgaatttctccctgggcgcgcggcgctttatgatcggcatgggcatgaaagtgctggtggccgacaccttgtcgccgctggtggacatcgccttccacctggaaaaccccagcctggtggacgcctggatcggttgcctggcgtattcgctgcaactgttcttcgacttcgccggctacagcgccatggccatcggcctgggcttgatgctgggcttccacttcccggagaacttcaaccggccgtacctggccagcagcatccaggatttctggcggcgctggcatttgtccttgtccagttggttgcgcgactacctgtacatcgccctgggtgggaaccgcgacggcgtgtggcgcacctatcgcaacctgttcctgaccatggcgattgccgggttgtggcacggcggtgacagctggaactacctgctgtggggttccgctcatggcgtggcgttgtgtgtcgaccgggcctggtcgcggtcgagcctgccgagcatcccgccggtgttgtcgcacatcctgaccttgctgtttgtgtgcctggcctggaccttgttccgtgcgccggacttccattcggcactgaccatgtacgccggccagttcggcctgcacggcatggccttgggtgacgcgatggccgtggccatgcgcccggcccatggcatggcggcgttgctgggcctggtgtgcatcatcgcgccgatctggcaggtgcgttgcgaaaagcgcttcggcacccagccgtggtttgtgctggcggcttcgctgtggccggtggccgggtttgtgttgtcgttcgcgctgatcgccagccgcgacgccgtaccgtttctgtactttcagttctaaggacgcccgaccatgcctgctcctattgcgccgacgcctccgagtgaactggccgtccgcaccagccccctggcggcctgggtgctggtgcccttcttggcggcggggctgctgtcctgcgcctggttgatggtgaagggcccgatcagctttgtgccggccaaggtcgacagcgacatgctgctgcacggcgacctgacccaccgttttgccaaggaactggccaaggcgccgatggcgatccaggccgccaacctggagcgcggcggcagctggctggcgttcggtgataccgggccgcgggtacgtcagggttgcccgggctggctgtttatcagcgacgagctgcgcatcaaccggcatgccgaagccaatgcccagaccaaggctcaggcggtgatcgacctgcaaaaacaactgggccaaaaaggcatcgacctgcaagtggtggtggtgccggacaagagccgcatcgccgcctcccaacgctgtggcctgtaccgcccggcggtgctcgacggccgtattcaggactggaccaaacagttgcaggcggccggcgtttccgcgctggacctgaccgacaccttgaagcccctgggcgccaatgcctacctgcgcacagacacccactggagcgaaatcggttccaacgccggcgcccaggcgctcgcgcagcgcatccggcagcgcggcatccaggcaacgccggagcagaccttcgacatcacccaggcgcccctcgccgtacgcccgggagacctggtgcgcctggccggtctggattggttgccgcccaggttgcagccgccaggggagtcggtcgcggccagcaccgcccatgaaaccggcggcgcaaccagcaacgccgacgacctgtttggcgacgccggcctgcccaatgtggcgctgatcggcacctcgttttcgcgcaactccaactttgtcggcttcctgcaaaaggccctgaatgcgccggtcggcaatttcagcaaggacgggggcgagttctccggggcggccaaggcctatttcgagagcccggccttcaagcagacaccgcccaagttgttgatttgggagattccggagcgggatctgcaaacgccctacgatgtgatcacgcttggtcggtaatttgacgatttgccgtttgtctaaaaaacatacagctttatcatcaaaataatgacacttttgcgcgcctgaagcagactgcttgcactagggcgaccacaaaaagacctgcggtaagcagtcgtatcagctgaccttttcacgtctttgggcttcgccgtgatgaggaattcgctatgagctttactgatggtctgcttgtgttgcttggaaaagatgtcagccgtgacgttcaggggttgaatgcgcggctgcatttttttggcagcatcccggtggatgacggcacgccgtttcccgcgcaaacccccagtgcgaatgcacagtcccagccggtagataaggctgtgcggcgtgcgtgcgtggtggcattggtgtcggtcaatggtggagtggggcgcagtaccctggccaccgcgttgagcagcggcctgcagcgcctgggtgaatcagtggtcgccgtcgacctggacccgcagaacgcgctgcgcatgcacttcggcgtcagtccgggttcgccgggtatcggcccgagcagcctgcgcaatgcgcactgggacgctctccagcagcccggctttgtcggcagtcgcgtgatcacctttggcgacaccgacctgcgccagcaagacgacctgcaacgctggctcaagcatgagccggattggctggcgcaacgcctgtccgccttggacctgagcgcccgtcataccgtgatcatcgacacccccgccggtaataacgtctatttccatcaagccctgagcgtggccgatgtggtgttggtgatcgcccaggcagatgccgcgtccctgggcaccctggaccaactcgacgtgctattggcgccgcaccttgagcgcgagcgtgcgccacacgtgcattttgtgatcaaccaactggatgaagacaatgccttcagcctggacatggtcgaggctttcaagcagcgcctaggcgctaaagagccactggaagtgcaccgcgacctggcgatcagcgaggcgctggcgtttggcaccgaccccttggacagccaggcattgaccttggccggggacgatatcaatgagatttgccggctgttgatagcgcgcagaaaacaacggtaaagcgcgcttttatacgcttgacgccagatgcttatgcacaattggttggatgcacctgtcacccaaccgccattttgtggagccgttctcatcacgctgcaactgcctgttttgcgtgcgttttattttgtgaacaaaaaatgaccagcctggcttttggcctgtagcgcagatgcctacaggctccgtaaagaatccatcaacagagttatccacaggctgcactgcgacaattttgccctctaatcgcgctcggcaagcaccatcaagttgcgcggtgtcagtgtgggatcgcagaaggtgcctacgtcgacctggtagccgtgctcgctgagaaacaatgcccgatccagcaccagccacagctccagcgggcgccgaaacagaccacgcaccaactccaggttcctgacctcggccaggcggcgccagccgtgggcctccagcgccgcccaatccggttcacctgtggataaccctttgaggtgcgccagctcccggcagtagtcggcgaagggcttgtccagccaactggcgggcagggacggcgtgggcaggtattcgtcgatgccgcgcagttcgcgttgcagttggtcgaaacccaggcgccgtgccatggacgtatcgcgttgcaagcgcacgcgtttgccggcggtgacggtttcgctcaacggcaggccgaggtcatcgatggacagttgcagggtcgaagcacggcctcgtttggacaatggctggtaagtgtcggcattgatgcggttgtagcagcacggcgccagcgccagctgcttgcagccgaccgcgctggccagttgcagcaggcgcacatgcaggtcgccacaggcgtgcagggcgacgggggtgtgttcggcgcggatcgccacatcggccatcacgtcttgcaggcgatgggtggcgggcaggccgtggtgatcgctcaaggcctggcccgccgcgatcagtgcggggtcgtattccaggcaggtcagggcttgatcggcttgcaccagccggcggcccaggtggcccttgcctgaacaccagtccagccagtgggtggtggcttgcgcaaacagcagcgcactgccgaaggcttcaatttgctcccacttgcgacctggaacatcgacattcaggcgatggcgagcgggagccaggggctgcgtcggtaacttatccacagcactgagcgcgcgagcttgcgcggcgagctgcgcaaacggcgccggtgccggcaggtcatgggggtggttgtgacagttttcggcatcgtccaacgagcgttggcgtagccattgggcgagttcggggtgctgggtttcccaaggcaagtgcagatgagtaaagggccgtggtttccacagcccttggtgctcgatcaggaacgcatccagcgcctggaagcgtgcctcaacgtccttggcaggcatcgacgcgcagccagcgttccagcagtttgaaggcgcgtaccagcacgtaggccatcaacaggtagaacaggcccgcagcgaagaagatctctaccggcaagtaggtacgggcaatgatggtccgtgccatgccggtcagttccagcagggtgacggtactggccagggcgctggccttgagcatcaggatcacttcgttgctgtacgccggcaggccgatgcgcgaggcacgcggcaggatgatgtagaacagcgtcttcggcttggacatacccagcgcacgtgcggcttcgatctcgccgggcgggatggcctggatcgcgccgcgcaggatctcggcgatataggcggcggtgtgcaaggtcatggtggcggtggcgcaccagaacggatcgcgcaggtagggccacatgaagctctcgcgcactgcatcgaactgcgccaggccgtagtagaccaggaacaactgcaccagcagcggcgtgccacggaagaagaaaatataggcatagggcagggcgctgacgtaccagcggcgtgaagaccgggcgatacccagcgggatcgccagcaacaggccggcgatcactgcaatggcgaccagctccagggtcaagatggcgccctgggccagcttgggcagccacttgatgatcacggcccagttcaggcccaggtcgaaatgcgccagccagctgtagtcgccgctcattgggtgctccttgcaaagccgcgggcggcgcgtttttccaggaagtgcatgccggtcatggccagcacggtgaggcccaggtacatgaaggcggcgaccatgaagaaggtgaagggctgcttggtgacggtcacgccgatctgcgcatggcgcatgatttcttccaggccgatcaccgatacgagggcggtgtccttcatcaggatcatgaacaggttgcccaggcccggcagggcgatgcgccacatctgcggcatgatcagccgggtgaaaatccgcaacttcgacatccccaaggcgacaccggcttcacggtggcccttgggaatggcgaggatcgcgccacggaacacttccgtggcgtaggcgccaaagcacaggcccagggcgatgaccccggcggcaaaggcgctgagggaaaggtcggggttgccgaagaactcaccgagggcacgcatcaggttgaccgtgccgaagtaaatcagcagcacccacagcaattcgggaatgccacgcacgatggtcgaatacgcaccgcccacccattgcagcggcttgtacggcgaagtcttggccaaggccccggcaaggccgagcaccagccccaggcacagggccgtgagcgccagtttgacggtcatcagcgcgccagcggcaagcgccgggccgaatccgtagagatcgaaattcatggtgttttcatatcgcggcaggcattgcaaaaagccgacgcgctcaactgagcgcgccgggcataccgttcagatcattcgatgctgaacgggaagtacttgtcgttgatcttcttgtaggtgccgtctgccttgatctctgccagggctttgttcaggcgctcgcgcagtgggtcgcccttgcgtacggcgataccgatcttgtcgctttctaccaccgggtcgcccttgaactcgtaggccgaaccgtctttgctcttgagccattcgtactgcacgtacttgtcggcgaggatgccgtccaggcgaccggaggtcaggtcgaggtaggcgttttcctgggtgtcgtacagcttggcttcggtatccggcagcttgtcttccaggtaggtgccggccagtgtcgcgcgttgtgcaccgatgaccttgcctttcaggtaagccgcgtcggtcttgaagtcggcggtggctttaggcgcgatgaattgcagcttgttggagtagtacgggtcggtgaagtcgacggcttgcttgcgctcgtcggtgatcgacagcgaggacaccaggaagtcgaacttcttggcgttcagggccgggatgatgccgtcccagtcggacacatacacttcgcatttctcgactttcatcttggcgcacagggcgtcgccgatgtctttgtcgaagccgaccacgttgccgctcgcgtctttattgttgaacggcgggtaggcggcttcgatccccattttcaaggtttctgccatggccgtggcgctgaacgccatcgagacggccgcggccagaaggaattttttatagttctgcatgcatgttgctccgttagcggttgctggacatgaattgtttgcagcgcgccgaaagcgggttttcaaacacctgctgtggcgatccttgctcttcgaccaggccctggtgcaggaacaccacctcactggacacctggcgggcgaagcccatttcatgggtgaccagcagcatggtgcgaccttcttcggccagcgcgcggatcacattaagtacttcctgaaccatttccgggtcaagcgcggaagtgggctcgtcgaacaggatgactttaggctgcatcgccagggtgcgcgcgatggccgcccgttgttgctggccaccggacaattgcgcggggtaggcgtggcgcttgtcggcgatcccgaccttgtccagcagggcttcggcgacttcgatggcttcggccttgctttggccgagcacgcggcgcggggcctcgatgatgttgtcgaggatgctcatgtgcggccacaggttaaagttttgaaacacaaaaccgatttcgctgcgcaggcggttgatctgcttgccgtcggcggccatcagttcgccgtttttcgcggccttgagcttgagttcttcgccggccaccaggatctgaccctggtgtgggttttccagcaggttgatgcagcgcaggaaggtggacttgccggaaccggaggaacccaggatcgagatcacatcgccgtcgcgagcggtcagcgagatacctttgagtacctccagctcaccatagcgtttatgcaagttgcggatttcaagcgcgggcgtggcctcggccatgtggggtcctcattgtgttcgttgcaatcctgctgttgggccgccttcctggcgaggcgccaagctagcatagcgtcctgatggcagccaacagcgcggccggcggtaaaccggtggtgtgcggcggggtgtcgcatcggcacagcagcgtgtcgcgccatcaacaaccgaacaaccgtttgaacccggaaaaccgcaggctttgcgtaaaaaagggcgcgatggtgccagctttggccgggtgttggaagggttaaccgggcaaacggtgcatatcagcccttttgtggggcgtcacgtactttttgtgtgtgtttatggtgcgtttattcgtcttcaatgtgggtcgcacggtaacgctatagcggaatgccattgttctcaatgacttgcgatggttgttgaatcgtcctacagcccgcgtcaatcgcggctctgtaacattttggcgcaaatcttgcgtaaaaaataaagaacgccctgttggtttcttttcacgagaaagatcccgggccgggtggaccgttttcgcaattcctcgcaaaggtgtgtcaatgagtagtacgcaaagctccaatgacctcgaacaggggctcaaaccgcgtcacgtcaccatgctgtcgattgccggcgtcatcggtgccggtctgtttgtcggctccggccacgcgattgctgccgccggcccggccgtactgctggcgtatgccgcggcgggcacgctggtggtattggtgatgcgcatgctggccgaaatggccgtggcgtcgccggacaccggttcgttctccacttatgccgaccgtgcgattggccattgggccggctttaccatcggctggttgtactggtggttctgggtcttggtgattcctttggaagccaacgccgccgcgaccatcctgcatgcctggttcccggatgtggccatctgggcctttaccctgatcatcaccttgctgctgacggcgaccaacctgttcagcgtgaagaactacggcgagttcgagttctggttcgcgttgatcaaggtcgtggcgatcgtgggcttcgtgatcctcggcttggcggcgatcttcggtttcctgccgaccagccaggtcagcggcgtttcgcacttgttcgacacccaaggctttatgcccaacggcatgggcgctgtgttggctgcgatcttgaccaccatgttttccttcatgggcaccgagatcgtcaccatcgccgccgctgaatcgaagaacccaggccagcaaatcaccaaggccaccaactcggtgatctggcggatcggtttgttctacctgctgtcgattttcatcgtggtgtccctggtgccttggaacgatccgaccctggcggccgtaggttcctaccagaccgtgctggagcgcatgggtatcccgaacgccaagctgatcgtcgacctggtggtgctggttgccgtaaccagttgcttgaactcggcgctctacaccgcttcgcgcatgctgttctcactgggccgtcgcggcgatgcaccggctgtggccaagcgtaccaacaagagcggcacgccttactgggcggtgttgttgtccacaggcgcggcgttcctggcggtattcgccaactacgtagcgccggcggcggtgttcgagttcctgctggccagctccggcgccatcgcgctgctggtgtacctggtgatcgcagtgtcgcaactgcgcatgcgccagaaacgcacggcggcgggcgagaagatcgtcttcaagatgtggctgttccctggcctgacctacgcggtgatggtattcatcgtggggacgttgaccatcatgctgttccaggaagcgcaccgcgtcgagatcatcgcgaccggcgtgctgagcttgctggtagtggcggcggggctgattgtggcgagtcgtcgcaaggcacagcgggtgggtgcagcggtacttaactgacccaatgtgggagggggcttgccccctcccactttgttttcgcgtcaggcttctgggttgatcagcgcctgggacgccgcgacgtaatccgcctgaaacgccggtgactcgatccatgccagtgcagccgcctcatcatcggtatccgtcgcccactgtcgatactcgatcagcgctgcgaggatgaaatcggtggcttgctcttcaccttcctgctccagcaccagcgccaacagcgggtgcgccaggaatgccgcgcacaaagcctgctggctggtttcgcctgcagtgcgcatctcgatgaacatctccgttaaatccaccgactccaagtcgatgcggctgtcatcgccggcaaatgcatccggtttgactgcgacggcgcgctgggtgcggttctgcttggccttggcctttgcccggtgggcgcgtttttgctgcttgttcggcgaggccatggggttggcgtcctagggttctgagtcagggtggagtattgaagcgcaggttgggggaaatcccaagggtatccgcggccaattgaccgttttgaagccacgccaatgcaatcggccacaaccggtcctgatattcgctgcggaaaaaagcgaaatgcccgacctggttttcgccgatgtcttccggcgctatgcgcagatgcgtacgttcgctgccgtcaaaataacccagtaaccgctcaatggccgccacggtgccgaaggggtcatccgtgatgctgatcgccagtatctgcgccttcacacggctgaagggcaggtcgcccagcgctcggccgctggggcgtgtttcatatcggggagtcggcgtgctccagtcgcgcactacgccggctggcgtatcttccagccagcccaggcgcttgccggggaagtatccgcacagtgccgtcagcagcggcattaccacatgccacttggcaaacatgcgccagcgtccgcttggcgcgtaatcgcgccagtaggcgaactgcgcgcctactgtgacgattcgacgaataacggcgcccgactccccaagcccagctgcgcagccgccgaagctgtggccgactacgtcaatgggctggcctgggaactcccgttgcgcacgcttgagcatcgcctcgaaatccagcatgccccaatccgaccacgaggctttgaagtggcgcagcgagccgttgcgggattcgccgatgccacggtagtcgtaggtgatgacatctaggccgttggcgaacaggtagtcggcgaagcgagcgtagtggcggcagcgtacggaggtggcggcgttgatgatcaccaccgggcgtgcggggtcggtcctgatatggcgccaggtgaagccgcccaggatatggccgtcggcggcgggttccttgaagggggcgctgtgatcgcgtgcgggcggggccggacgcaattgtaaagaggcgtcgttcaaattcattggtttctcgaccctgatcggttcttgtttttttagtaacagttggtcagtttgccagtacttgcgctgtcatttggtggtttatcaaatgacggattggatcgcctgcttacgtcgctcgacctggagccggtatatacataaccttgcgctctttcgattcgacaagaaccaccttatgacccgcgataccctcgaacacaaccagattccgatctacctcgtcactgtgttgctggccgtcgttttcggtctgcttccactctcattcacccacgaactcagcgcactggtcacccccgccatcgccgtgctgatgtacgcgatgttcctgcaaataccgtttctcgacctgcgccaaggcttgggtaacaagcgcttcctgtccgccttgctgctggccaacttcatcctggtgcccttgctggtgtgggccttgacccaaagcctgctggggcgcccggcgttgctggtcggcgcgttgctggtgttgctgacgccctgcatcgactacgtggtggtgtttacccatatcggcaagggcgattcgcggctgatgctggcggcgacgccggtgctgttgctgctgcagttggcgctgctgccgttatacctggggttgatgctggggccgcagtctgaggtcgtggtggcggcggggccattcgtcgaggcattcctgttgttgattgtgctgccgatgattctggcagtgctcacgacttccctggcgcggcggtcatctgtcttcaacgcgtggagcagcgcctgggcatggttgcccgtacccgcgatggcgctggtgttgtttgtggtgatcggttctcaaatcacttcagtggtgcgggatatcaacctgctgttgccggtgattccggtgtatatcggcttcctgttgctggccccgttgatgggggcgctggcgtcgcggctgtttgcactccctgctgcaacggcgcgggcggtgacattcagcgcgtcaacgcgcaattcattggtggtgctgcccttggcactggcccttcccgaagaggtgcgcgggttggcggcgacggcggtgatcctgcaaaccctggtcgaactggtgggggagttgatttacgtaaggttgatcccgaagtgggtgtggcccgcaggtcggtaggcgcgggaatcttccagtctgttcaggcgctattcagcagggcagtcggcaccataagtcggcgccccttacctgacaggtcaaccgatggaccaccgcaaccgttttcgcctggaatcctcagggatttttctcttcgctctgttgttgttcaccttgggcatctgggatcagcagccccaagggtttgacgggcgttgggcgctgttcctgcaagagatgtttcgccatggcgtgagttttttccctaccacctatggtcagccctacgcggattaccccggcaccgcgaccttcttcagctatgtgtttgcccggctgttcggtgcacccaaccatctggcgaatatcctgccgaccgccctggcttctgctggcgtagttgcggtggtctaccgcttgttggtgcctgcaagccggccttgggcgctgctcacggtgctgctgaccttgctcaccacccaactgctcgaaaagtcccgctcggtctgcctggatcagatggtggcattgctctgtgtaggtagtttctacctgctgcacagcggcggacgctggaggcggcttgcagtgttcccgctgtttgtcctgggttttgcgatacgcgggccattggggttgatcgaggtctgtggtgtggtgtgtgtgtattgggcgctgggcaagcctggcgagcgcgtgaaacaggtgctgattcacggcgttgtcggcctggtgctgctggcagtgtgttggtggctgctggtgaagttggcgcgtatcagcgggggcgatgcgtttgccgatgaagtattcaagatgcaagtcggcggacgcctggatgaaaccggcgagccgttctacttctatttccagctgagtctgtaccgctacttcccggtggtgccgttggcgctggccacgatgattgccctgcgtcatcgctggcccgagcggtttgagggcgacatgcaattggtcgcgcggctgggtgcctgcggcttgatgatcttgctcgggctgtcgataccgcacttcaagcgcgcttattacatcctgcccatggtgccgatgttcgcggctgtcgcggcctatgggctgctccaggcgcaaggctggcttgcgggtgtgcgccgctgctacgaagggcttgtcgtcgcgctaccggcgttgtgtgtggttgcgatctttgtgtgtcggcatggctggcagaagcatggttactggccggacgtttcactgccgctgctgattggcgggctggtggtgctgcaagtggcggcgctgatcgcctggcatcgggtagggcggttggtgtggctcagcctgatcgcgttgatggcgcagtgggtgttgttggtcactgtggtagagccgtccaaggatatgcagttcgatacccgcaagtttgtcggccaagtggaggcgctgcgtgccacgcagccggggccgctggtgttcatcaatctcggccgggacacctgggcggtgcgctacatgatgaacctggatcacgatgagcagcccgtatttatccgcagcaatgagcttgagcggctgggcaacttgccccgcccggcctgggtgatcgtcgcgcgcaaggaaaccgcgctgttgcagggaacgcctgtggaacacctggcgccaagcttcgaagggcggttgaacgacaacccgctgatggtgtttttgctggagtgaatcagcacggacttcctggtctggggggggcgtgtgatgggcggagcgagccaggccttctccaagtgaatgcggttcccgataaaggaagtattcagtgatgcgttgggctactgttgcctgcgcaaaattcactgacgcacattttcaaggattgaaatgaaagccacatttctcgtgttatccgccttccttctgctgctctgcggctgcaccacgccgctgacctctgacatgtccagcccttcaattgccgacaccaaaacggtggtgttcggcggcaagacgttcgtcttgaaattccagaagccgggtttgtgggagtatttccccgcagaggaaagcatcgatgcctggaatgaaatggtggactttaccgtcgtccctcgcgagatgaaccgcttcaagcccctcgacctcggcaagcgcgccatccagctccaccagcaagaaaatccgaacatgccggcgatcctgctgaccgacaataaaaccggaatcgattattcgatgatgttttatcccacgtcattgcgtaaagacgggcaattctcggaaatcagttatttcaagtattacagggacggcaccaccgggcagaccatcatctttcactttgccaggaatatcccaaggtcgagcaatccctcggaaagcgcgatagagaccggccgggaaatagtgccgctgatagaagcgttcccgctgtatcggccctgatgccgttgagcgggcagcacgaatcgattcccaggcggtgattgccggaaaagcgtctacaggattttttggggggggatcgcacccactggtacgacgtaggcgtgcagttttgaagccctgaaacgagaaaacccctgagacctttcggaatcaggggtttcggtatttggtgcccagagacggaatcgaaccgccgacacggggattttcaatcccctgctctaccgactgagctatctgggcaacggggcgcattaaacgggtttttcagggggtcgtcaagcaagttttcgaaaaatatttaattattaccgtcgcttacgtgctgaccccggtttttgatcaattattgagcaggcggcacgtagccgtcggccttggcgtattcctcgccggaaaagaacttgtccatctcgcctgccaggtatttgcgatcttcggcgttcatcatgttcaggcgtttttcgttgatcagcagggtctggtgtttcaaccaatcgccccaggctttggcggagacatgttcgaaaatgtcctggcccttggcgcccggatacggagggcgttccagtccgggcaattcttctttgtacttgcggcacatgatggtgcgggtcatgacgacactcctgcattcaatacgtcggccgcgcgcttcagcagttttttcaccggggcagcaaggcccaggcgcggcggggtggcgaggttataccagagccagtcggcctcggccacgtgatggacggtttcctcgacctggatcaaccagggttcgatggcgagttggaagtggctgaaggtgtggatcaaccccggcagttcctgttggttgcccagttccagcgcgtgctggtgggccaggtgttccaggtcttgcaggtcatccagctccggtaaactccacaggccgccccacagcccggtggaagggcgacggtaaagcaggatcgcgccctcggcattcgccagcatcggcatcagcgtgcgcttttgcgggatggtcttgcgcggcttggggatcgggtagcgcgtctccaggccgagcatgtgggcttcgcagcctttttccagcgggcacagcaggcaactgggtttgctgcgggtgcagagggtggcgcccatgtccatcatcgcctgggtgtaggcgttgacgcgggtctggggcgtgaagcgctctgcggtggcccacagctgcttggccaccttgggttcgcccgggtagccctcctgtgcggtaaaccgcgccagcacacgcttgacgttgccatcgaggatcggcgcacgcaggcccatgctcaggctggcaatcgcgccggcggtggacaggccaataccgggcagctcggtgagcttttcgacatccctgggaaactcgccaccgtactcggccacgacaatcttcgcggtcttttgcaggttgcgcgcccgggtgtagtaacccaggccggtccacaggtgcagcacttcatcttccggcgcggcggccaaggcttcgaccgttggcaatgacgccatgaagcggtcgaagtaattgagcaccgtgctgacctgggtctgctgcagcatgatctccgagacccacacccgataaggcgtgatgccctgttgccagggcaggtcatggcgaccgtggcggtcgtaccaattgagcacggcctctgaaaactgctcgtttctcatcgcttgaacaggcccttcaatgcatctttcaactgcgggttcaccttgtcgagcttctcttccagtttgtcgctgagcttgttgccggccgccttgatggcgacctgggtcaagccgtccttgtccaggcggcaggccttggcccccagctccagcgggccacggcagcgcagcggcacttcgatgccctggaagttggagccgacctggcaggcagggtccggcgtttcgcgctggtcgccctcgacaatgatgccgacgcggtagtccatgcccagcacgcgcaagtccacatcaccgttaccgttgacggtcaggcccgggatgcgcactttcaggtccgggttgctggctacaccgttacggaaggccaggttgcctttcagctcctggaacggcgtgtccttgcctggcggcgtgctgctcagggtcttgcggttgagcagggcaatgccggtgcacagttgttgctcaaggttggcgttgagcagcacgccgttgttgatcacaaagctggcggtgccgttgaggctgtcgatcagggctttctggctgttgccgcggcctgtgaggttgctgtccagggtgatctggcccttcaccggcgggttctgcccctgggcctgcaggatgcgctcgaccggcacctgcttgatccggctttgcagcgccagcacaggaatatcctgacgcacatcgaggctgccgttggcctggaaggtgccgttgtagaggccgccgctcaaggtctcgagcttgagttggccatcgatgccggacgccttgagcgccgcattctggatcggcaatttgctcagggtcagttgaccgaaggcgaggtcggcatccacgtcgagcgtgcgcaggcgcgtcaatggcagcagcttgtcggtgctccaggcgcctttggtcggcgcatcgggcaatggtgtggtgccgccggcggccatggcgccggcttcgctgttctgcacctcggcctggcgtgcggcgcttgcacccttggcggattcggacttggccggcaggtagttgtcggcgttgaacgtatcgcccttgagctgcacgcgcagggactgtttggcgaaatcgtccaccgccaggcgaccggtgaaggtgctgccgtcgagtttcaggttcaggtcttccagtgccaggctggtcggggtgcccttgaggcggctgaccagttcaaccttgctcaggctgccctcggccatcggtggcagggggtggccgacgctgtcgaggaacttggccaggtcgaactgggcaatggacagtgcgccgctaagctgcggggtcttgtccaggtcgttgaccttcagctcgcccagggcgcgcaactggttggccgagagtttcaggttggtccattcggcgatattggccgcctggtccaccagcaattggccctgggtggagaaggtcacggtcttgccttgcagcggctcgcccgtggcttcgccggtgatcttcatgtcttccagctcataacgcttgagggcgcgctggatgcgcaggttgccattgagctcggtcttgacgcgcatcaccggctggttggtgccgaagaaggcagtgagtttcaccgggatactggcaccttcgtgcacagcgccggcgctcagctggatgctttcggcgctgaactgcttgccggtctgctcgtcgttgtattcgatgcgggcgttgttaatggtcaggctgtcgatgtccagccggataggtttcgagggtttctccggctcgggctcggcggcctgttccacggcagcgggtgcgctagcgctcggctcattggcgttcttgccgatgtcttcccaatcgccgtggccttgtttgtcgcggttcaggcgcaggttgaggccttcgacacgcacatcgctcatctgcacttcacgacgcagcagcggtaaaacccgtaccgacaggccgagcatctgcaagtcggcgaacggtttggttgggttggtcagggtcgccacgctggcttcgtgcagttccagcccgagccaggggaacaggctccagccgatatcgccattgagcgtcagctcgatgtgggccttgtcgcgggcaatctggcggatctcgtctttatagtcgttgggatcgaagaggtgggtcagggcaaagcccagggccacaatgatcagcaacagcccgagaagtaccagacccaggattttgccgaacgctttcatgggcgagtccttgtatgtcgatttcaaaatttagccgcagagtataacgcccgacggcctgcgtcagtgccccgatcgttacattgtatccagggggcgggaaacgggtttttgacgtcaaacaaagcagatttcctgaaaaaggtgatggcagtttggtttttctgtcatccacagatgctaatctctgcatgttcgtccgccttctgcgacttaacgtcgcgcctaaaacggagcttcactcaacaaaacggccacgctttgcgtgcaaggccgagggagagagcgcctgacggacacatactaacaactgggggaaacaccaatgagcactagcactgcggcagcttcatctgccgcgcagcctgcgttcctgtccaaggaacgcattatcgccaagcccggcttcaaccgctggctggttccgccggccgccttggccatccacctgtgcatcggcatggcctacggcttctcggtgttctggctgccactgtccaaagcgctgggtatcaccaaaccggtcgcctgcgcgccggacatgagctttatcgctcaagtcttttcgtcccaatgcgactggcccatctccatgctgggctggatctacaccctgttcttcatcttcctgggctgctcggcagcgatctggggcggctggctggaacatgccgggccacgcaaggcgggcgttgtttcggcgctgtgctggtgtggcggcctgttgatttcggcgttggggatctatacccaccagatctggctgatgtggatcggctccggggtcattggcggtatcggcctgggcctgggctatatctcgcccgtgtcgaccctgatcaagtggttcccggacaagcgtggcatggccaccggcatggcgatcatgggcttcggcggtggcgcgatggtcggtgctccgttggcagcggcattgatgggccacttcgccacgcctaccagcgtgggtgtgtggcagagcttcctggtgatggccgcgatctacttcgtgttcatgatcggtggcgccttgtcctaccgcgttccgccgaccggctggaagcctgagggctggaccgcaccggcgaaaaaagccagcaacgccatgatcacccaccgtcacgtgcacgtgaacgtggcgtggaaaaccccgcaattccgcctggtatggctggtgctgtgcctgaacgtctccgccggtatcggcatcctcggcatggcttcgcccctgctgcaggaagtgttcggcggcaagttgctgggcctggatgtgccgttcggccaactggacgccgggcaactggcctccgtcgccgccattgcggcgggcttcactggcctgctgagcctgttcaacatcggtggccggttcttctgggcgtcgttctccgactacctgggccgtaaaaacacctactttgtgttcttcgccctgggctttgccctgtacgcgctgatcccgaacctggggcacctgggcaacgtggcgctgttcgtggcggcgttctgcatcatcctgtcgatgtacggcggtggttttgcgaccgtcccggcctacctggccgacctgttcggtacgcaaatggtcggcgcgatccacggtcgcctgttgactgcctgggcagcggctggcgtgttgggtccggtgctggtgaactacctgcgtgagtatcagctgagcatcggcgttgaacgcgctgcggcctatgacatcaccttgtacatcctcgctggcctgctggtgctgggcttcatctgcaacctgctggtgcgcccggtggcggacaagtacttcatgaccgacgccgaactggccgccgaacaggcgctgggccatgacaaaggcgcggatgcgaccacctccctggagtggaaagcagccccaggtaccgtgccgttggcgattgccgcctggctggtagtgggtattccgttggcgtggggtgtgtgggtgaccctgcagaaaacggcggtactgttccactgatgcaatacctgtagggacccgctttttgtggcgagcgggcttgccccgcgtcgggtcgcgaagcgaccccaatgaggccaacgcgttttctcggttaaaacgcgctggctggttttggggctgctacgcagcccaacgcggggcaagcccgctcgccacataagcgggtacccacatgtatgcacatgtctatccccgacattcctcgctccaactcgtcagtcttatccccttcgatgtttctgtttagcgcccgcgcccctataatggctgcctttttcgcccaatgattttgcggagctggtgatggccgaacgtaaggcgtccgtcgagcgcgacactctggaaacccagatcaaagcctcgatcaacctggatggcaccggaaaggcccgatttgatatcggtgtaccttttcttgagcacatgctggaccagatcgcccgtcacgggctgatcgacctggatatcgtcagcaagggcgacctgcatatcgacgaccaccacacggtggaagacgttggcatcacgttgggccaggcatttgccaaggccatcggcgacaagaaaggcatccgtcgctacggccatgcctatgtcccgctggacgaagcgctgtcgcgtgtggtcatcgacttctccggccgtccaggcctgcagatgcacgtgccctacacccgcgccaccgtgggcggcttcgacgtcgacctgttccaggaattcttccaggggttcgtcaaccacgcgcttgtcagcctgcacatcgacaacctgcgcggcaccaacacccaccaccagatcgaaaccgtgttcaaggctttcggccgcgccctgcgcatggcggtggagctggatgagcgcatggccgggcaaatgccttcgaccaagggcgtcctgtaatgcagacggtcgcggttatcgattacggcatgggtaacctgcactcggtggccaaggccctcgagcacgtaggggccggcaaggtgctgatcaccagcgaggccaacgtgattcgcgaagccgaccgggtggtgtttcccggcgtcggcgcgattcgcgactgcatggccgagatccgccgcctgggctttgacagcctggtgcgcgaagtcagccaggaccgcccgttcctcggcatctgcgtgggcatgcaagccttgctcgaccgcagtgaagagaacgacggcgtcgattgcatcggcctgttccctgggcaagtgaagttcttcggcaaggacctgcatgaagacggcgcccacctgaaagtcccgcacatgggctggaaccaggtcagccagaccgtggatcacccgctgtggcacgacattccggacctggcgcgcttctacttcgtgcacagctattacatcgccgccggcaaaccgggccaggtggtgggtggcgggcactacggcgtcgacttcgccgctgcgctggccgaaggctcgcggtttgccgtgcagttccacccggagaagagccatacccatggcctgcaattgctgcagaacttcgccgcctgggacgggcgctggtaaatggcccggaagccgaagcagccggtcttgaacctcacgcctgaacaggagagtgaggctaccctcaagatcaagcgtttcatggaagatcgcttcgagctcaagctggggtcgttcgaggtcgccgagatccttgaactgttcaccaccgaagtggctccgcactattacaacagggcgattttcgacacgcagacgctccttaaagaaaggttcgaaagcatcgaaagcgacctgtggtcgcttgagaaaccctgatttcccaagcattgctgaatatcgaataaggtttgccagatgctgattatccccgctatcgatctcaaggacggtgcctgcgtacgtctgcgccaaggccgcatggaagactccaccgtattctccgatgacccggtgagcatggccgccaaatgggtggaagggggctgccgtcgtctgcatctggtggacttgaacggcgccttcgaaggccagccagtgaacggtgaagtggtcaccgccattgccaagcgttacccgaacctgccgatccagatcggtggcggtatccgctccctggaaaccatcgagcactacgtcaaggccggcgtgagctacgtgatcatcggcaccaaggcggtgaaagatccggcgttcgtcgccgaagcctgccgcgcgttcccgggcaaagtgatcgtgggcctggacgcgaaggacggttatgttgccaccgacggctgggctgaaatcagcaccgtgcaagtgatcgacctggccaaacagttcgaagccgacggcgtctccgccatcgtttataccgacatcgccaaagacggcatgatgcagggctgcaacgtgccgttcactgctgcgctggcggcggcgacgaagatcccggtgatcgcttccggcggcatccacaacctgggtgacatcaagtcgctgctggatgccaaggcacccggcatcatcggcgccatcaccggccgggcgatctacgaagggaccctggacgtcgccgaagcccaggcttactgcgatgcctacaacggctgaggactgaccatggcgctggccaaacgcatcatcccttgcctggacgtcgacaacggtcgcgtggtcaagggcgtcaagttcgagaacatccgtgacgccggcgatccggtggaaattgcccgtcgctacgatgagcaaggtgccgacgaaattacctttctcgacattaccgccagcgtcgacggccgcgacaccacgttgcataccgtcgagcgcatggccagccaggtgttcatcccgctgaccgtgggcggtggcgtgcgtaccgtgcaggacatccgcaacctgctcaatgccggcgcggacaaggtctcgatcaacaccgcagccgtgttcaaccctgagttcgtcggcgaagccgcgcagcacttcggttcgcagtgcatcgtggtcgccatcgacgcgaagaaagtctccggcccgggcgaaaccccgcgctgggagatcttcacccatggcggccgcaagccgaccggcctggacgcggtggagtgggcgatgaagatggaaggcctgggtgccggtgaaatcctgctgaccagcatggaccaggacggcatgaaaaacggcttcgacctgggcgtgacccgtgccatcagcgatgcgctgggcatcccggtgattgcctccggcggcgtcggcaacctgcagcacctggctgacggcgtgatcgaaggccacgccagtgcggtgctggcagcgagtattttccactttggcgaatacaccgttcccgaggccaaggcctacatggcggcgcgcggtatcgtcgtgcgctaaacgctgctggacagcatggcaggccagaggcactctctgcgcttgccatggattccggtaactttcatgttcaagcacctgctgctcgccctcgccagtacgtccctcctgttgaccgctccggcccacgccgaagaaccgtccgacgcctccctggtgttgctgacggaaaatttcccgccctacaacatggcgaaaaacggcaagaacttcgccaaggacgagaacatcgaaggcatcgccgtggacatcgtgcgcgaaaccttcaagcgggcgggcatctcctacaacctcaccctgcgttttccctgggagcgcatctataagctcgccctggagaaaccaggctacggtgtgttcgtgatggcgcgactgccggaccgtgaagcgctgttcaaatgggtcggccccatcggtccggacgattgggtgctgctggccaaggccgacagcaagatccaactggacgacctcgaacacgcgcgccgctacaagatcggcgcctacaagggcgatgccattgcccagaccctggagaagcagggcctgaaccccatcgtcgtgttgcgcgatcaagacaacgcgcaaaagctgctggatggccagatcgacctctgggccaccggcgaccccgccgggcgttacctggcacgtcaggtgggtgtgaccgggctcaagacggtgctgcgttttaacagtgcccagctctacctggcattgaataaagacgtgccggacgatctggtggcaaggctgcaggcggcgctggaccagttacgcaaagacggtcacgtcgaggagatcatggcgcgctacctctagcgctcaacgcggtttgagcaaatcgacccgcaatgtcgacggttggtcggcctggtcgaaggcataggtgcagaccttgaccggctgatgattcacgctgaccaggcgcacgaacttatcacctgccccctgcggcgcgtcattaagtgggtacacgatatcgatcggctcgtcgtcctcctcctcgggtacatgagggtggggaatgggcaggtaatccaccgggcgcaggcaatcggtcgtggcagccgggccgtatttgtaggtgtagcggctcatgaacggcggtgccaacttccaggccagggtgtagccctgcagcgtgtaagggtcgaggaggatgctcaggtcgggagtgcgcgccgggcccggctgggctagttctaccgcaagggtcagggcattgcgcatcatgccgctggtagctgggtgttcggcggaatcgaccccaatgatgcacagcatgtgcatcccggtctgcgggcctatggcgtcgttgatgcgtgcgccgcgtgcgtcaatcggtgcgctgtacagcgccgggttttcgcattcggcggcacggcgggtggttttgtagcgataaaacggcgtgttcaccttgaacgccaggttccaggtcggggtgatgtccttgccgcgcccgcccggttttttcacgtagtactgctggataggctcgggattctcaaaggtaatgctggtggtaggaaaaagatcgcactgttctacatccgcttgcagaacaccggccacaaaacaccggttgagaaacgtgaccgggctgccgtagttggtgtcttcatgccagctcggcgtgccgtccaggatctcgcacggcgcatcacgttggcatttatgttcttcggactggccggcggtgctggtgctgagaataccgaacagcgtgttggacgctcggtccagcaacgggccgccaaagctgccaaggcgtacgcccttgcactggttcttcatggtgattcgccacacgaaaggttgctccaccagttcgcgcgaggtttgttgggtgcacgcggaaagatgcaaggtgtcccacgccggcgccgcgagtgccaggatgtcgttgccgtcggcgggcacttccttggccagttttaccggggttatgccgttgttgagcaggctcgacaacgtggcgtccaactcgatgattgcaaggtccacgccttggctgctgccccacttcaaggtcttgagcgggtaggtcttgatgcgttcgagggtgtcgtcgaagtagttgaaactgatgctgcctttcatcggcagatctttttgcacgacgccattcacgcggtgcaggcaatggctgctggtgaccacgtaagccgggccggactggccggtttcgtcgcgggtgtcgagcagcgtggcggtgcatagggtctgggcttcgttgcgaatacgaccgacgccagtccaatgggcgtgctggtgctgcgcattggtgagcattttgggtgggctggcgttggcaaggccttcaccgtagtcctttggtgccgcgacaagcaggctggaaaggctgctgatcagcagccctgtaatcaagggatggaatgtgttcatggagtgtcctgaaagcgtgagcgtgaggctcgactattcaggagtgccgggtaggcaggtcggtagctatctagtacttgccgtttttgccatgtccagccatggcctggttgctgcgcacgctgatcatcaacttgatatcgatccagtcgatgccctgggccttgagcttgggcaactcgcgttccagcaccgccagtgtctgtggatacgggtggccgatcatcaccgccgaaccctgtttgtgcgccagcttgattgcagtctgcaactgcgtggtaatcgccgcttcggtgcgttcgtcgtccaggaagacgtcccgcgagacgctggccaggccgatcttctgcgcctctgcggcggcgaccgtcttggcgctggtgcggctgtcgacaaagaacttgttgcgtcgttgcaactcgcccatcaaccaggccatggcttggggctgcgcggtcatgcggctgcccatgtggttgttgatgccggcggtatagggcactgccttgaaggcagcgtccaggcgcctgccgagttcttcgatgggcagctccgggtgccaggcgaaagggccggtggccgggtccatgggcatgtgcaggatcacgatcttgccggctttgtgcgcttcgcgggcgaattcggcggcgtggggcgtgtcgggcatgatcgccgtggtcactggcccgggcagggccagcacgcgacgatccctgggcaggttttgcccgaggtcgtcgatgatgagggtcaggtaggctttttgaggctcgccggccggggtcgcatgggcgaccccggccaggctgcacagcacagcgatgatcagggcaaaacgcatatcaacggctgcgcgtgatgctcaagcccttgagcaggctcagcgcctgggcgagttggtagtcatcgtcctgcggcatcggcttggctttcttgccgctgccggtgggctggtcggcgccgccgttgccattgcccaggtggccttgcaggtcggcctccttgtagtactcgctgtcgatctcgttggtgatcttggctttgcgcacctcgatgtccggcacgatgccctgggcctggatcgagcgcccgtttggcgtgtagtacagagcggtggtgatcttcagcgcacgctcgttgttcagcggcaatacggtttgcaccgagcctttgccgaagctggtggtgcccatcagcacaccgcgtttctggtcttgcagggcaccggcgacgatctccgaagccgaggcgctgccgccgttgatcagcacggccaatggcacgttttcgctgaggtcgttgccggtggccgagaagcgcagctcggaattggcgatgcggcccttggtgtagacgatcaggcctttggtgatgaagtggtcgaccacttccaccgccgcctgcaacacgccgcctgggttgttgcgcaggtcgagcacgataccgctgagcttcttgccgttgtccttgcgcagcttggccagggccttggccacttcgtcgccggtcttgacctggaactgggtgatgcggatgtaaccgtagcccgactccagcagctggctcttcacgctcttgaccacgatggtcgcgcgggtcagcgtcacgtcgaacgggttgccgccgtcgcgcaccagggtcagggtgattttctggccgatcttgccgcgcatcttgtcgacggcttcggtcatggtctggccgcgagtcggctggccgttgatcttgacgatgaagtcaccggcctggatgccggccttggacgccggggtgtcatcgatcggcgagaccaccttgatgttgccgtcttcggcgccgacttcgatgcccaggccgccgaactcaccgctggtgctttcctgcagctcggcgaagtcttcagggcccaggtaggcggagtgcgggtcgaggttgctgagcatgcccttgatggcattttccagcagggtcttgtcgtctacgggttcgacatacgcggccttgatgcggtccatgacctcggcaaaggtgcgcagctcgtccagcggcagcggcgccttggtggtcgcggccgtgctggccggggccgccggggcagcctggtcggcgaaagccaggggcgcaccgatcaccagggcgatcgtcagggccagcgatgtgaggcgggacaaatgctgcatgtcgaacgaactcctaatgtagatgcggccctatccttgggaacggcaccattgtgcgggatcgcttgggcgaccctgctgacgaatagcgaagtacagcgccggggtgtcctggccaccactgttacccacagtggagatggattcaccggcttttacaacatcacctgccgacttgagtaatgtctgattgtggccgtaaaggctcaaatagccattaccgtggtcgagaatcaccaataaaccggcgccccgcagccaatcggcaaacaccacacgcccaccgtggaccgcgtggacctggctgccagcggaggcgctgatcatcaccccatcccacttggcgcgggtgtcatcaccacgggtttccccaaagcgtgccagcaatcgaccatcaactggccatggaagtttgccgcgggctgaagcaaaaggcccgccgaacgactcgccggcgctggaaaccagtgggccaggcgccgcatgcgccggtttgcgcggtgccggcttatccgtagtggcggccagttcggcctcacgctggcgctttttttcggcttcttgctgggcgatcagcgctttctgccgcgcttcttcggcctcgcgtgcctggcgggccagggtttcttcgatggttttaagcactttggccaggtcagcctggtcctgctcgcgcgcctggagcttggcgtcgcgggcctttacgtcgtcattgagcttggccagcgctagttggcgctccttgcggaccttgtccagctcgctgcgctgggtgtcgagggcgactttctggtcttgcaactgggattgctgattggcgatttcctgctcgacattgaccaactggcgcagggtttcattgaagcttttgagttgctccagccgggccttgctcaggtagtcgtagtaagtgagggtgcgcgcgaatttctcggggttctgctggttgagcagcagcttgaggtattcctggcggccgttctggtaggcggcacgggcctggatcgcgatcaggcgttgctgttcaacgcgtgcgctctggagtttttttttctcagcgtcgagtcgctccagttccgactcgctcttctttaattctttttgtagctcctggacctgcttctccagcttgcccatctcggtttccgtgccgcgcaggtctttctgcaccccggatttctcttcctggagcttgccgagcagttttttcagctcggtaatgtcctgacgcgtagcgtccaactgttgttgggtttgtgcacgctcgtcggcaaacgccggttggagcaggcagacaagagcaagggtaatcaaggcgcgaagcatagaggcgggcgacaccagggaaatggacggcctagtatgcccgccaagcgcggcaaaaaaaacgcccaattcgggctgtagcgcaagataggtgccgagtggcagtggtatggcaaaaagacatgttccaaactgcgcagatccaatgtgggagggggcttgcccccgattgcagtgtgtcagccacataggtgtcagctgatctaccgtaatcgggggcaagccccctcccacattgtttttcggtgaagctggaatcagaccagaatcgaagtcccggtcatctccaccggcttctccagccccatcagcatcagcatggtcggcgccacatccgccagcacgccaccgctacgcaccttgaaatcacgcttgccgacgtagatgaacggcaccggctcggtggtgtgggcggtatgggcttgcccggtggattcgtcggacatctgctcgcagttgccgtggtcggcggtgatcaacgcttcgccgccaaccttttccagcgcgtcgacgatacggccgacgcacaggtccaggcattccacggccttggtcgcagcttccaggttgccgctgtggccgaccatgtcaccgttggcgtagttgaccacgatcacgtcgtaacgctggttgtcgatggcgtcgacgatcttgtcggtgacttccggcgcgctcatttctggttgcaggtcgtaggtggcgacctttggcgaagggatcaaaatgcgttcttcgcccgggaacggctcttcacggccgccggagaaaaagaaggtcacgtgggcgtatttttcggtttcggcaatgcgcagctgggtcttgccgttttttgccaggtagtcgcccagcacgttgtccaggctgctggcggcaaaggcggcgggggccgggatgctggcggcgtattgggtcaggcccacgtactgcaccttcggctggcgggagcgctcgaattccttgaagccgtcttcgacaaacacgcggctcagctcgcgggcgcggtcggcgcggaagttcatgaacaccacggcgtcgccgtcttcgaccttgaccggctcaccgatggtggtggctttgacgaactcgtcgctttcgccacgggcgtaggcagcttcaaggccttcctgggcggtggcggcattgaattcggcctggccgtcgacaatcaggttgtaggcctgggagacgcggtcccaacggttgtcacggtccatggcgaagtaacggcccaccaggctggcgatgcggcctttgccgagggcggcgaaggtggtgtcgagcagttcgatggacgactgcgcgcttttcggcggggtgtcgcggccgtcgaggaaggcgtgcaggtagatcttgtcggcgccgcgcttgaaggccagctcggccatggcgaccaggtggtcctggtggctgtggacgccgccatcggacagcaggcccatgaagtgcacggccttaccggcagccactgctttatcgactgccgcgcagatggtcgggttctcgaagaactcgccatcgcggatcgctttggtcacacgggtgaagtcctggtataccactcgtccggcgccgaggttcatgtggccgacttccgaattgcccatctggccgtccggcagacccacgtccatgcccgagccggagatcaggccgttgggtacggtggcggtcaggcggtcgagtacaggcttcttggccgcgtataccgcgttgtcgtggtggctttcactgtgtccgaagccatcgagaattatcaggaccaaaggtttaggcgtagtagtcatagatcctctcgtggcggtaataaaggaagacaattgaaaagggagtggcagtttaaagcgaagttccgaccacgtcaccgctttacgggggttggccccccctgacggctgtgtatacttaccgccattttaacgccctggaacctccttgatggttgatcacctgattgcatttgccactgcccactatctgctcgtgggtgccttcgtcatcctgctggcgctgttgatcgctcacgaattgagccgcggtggccgcagcctgagcacggcggagctgaccgcgctggtcaacaaggatgaggccgttgtcgtggacatccgtccggccaaggatttcgccaccggccatatcgtcggcgccctgaacattccgcaggacaagctgatcgcgcgcctggccgagctggaaaagcacaaggccaagaccatcatcctggtcgacgcccaaggccagcacgccggcacccacgcccgcgaaatgctcaagaccggtttcaccgccgccaagttgtccggtggcatcagcagctggcgcgccgataacctgccgctggtgaagtgatatgagtcaggttgtcgtgtattccagcgattggtgcccttactgcatgcgggccaaggccttgctggagaaaaagggcgtcgccttcgaagagatcaaggtcgacggcaaaccccaggtgcgcgccgaaatggcccagaaggcggggcgcacgtccgtgccgcagatctgggtcggcgccaggcacatcggtggctgcgacgacctgttcgccctggagcgcgccggtaaactcgatgcgctgctgctcgtctgactccttaaaccctaaaagaccccaagatcacaaggatctgagatgactgaccaacagaacaccgaagcagcagaagccccagctccacagttctcgctgcagcgcatctacgtgcgtgacctgtcgtttgaagcgccgaaaagcccggccatcttccgtcaggaatggaccccaagcgttgcgctggacctgaacacccgccagaaggcgctggaaagcgacttccacgaagtggtgctgaccctgtccgtgaccgtcaagaacggcgaagaagtggccttcatcgcagaagtgcaacaggctggtatcttcctgatccagggcctggacgaagcctccatgagccacaccctgggcgcgttctgcccgaacatcctgttcccgtacgcccgtgagaccctggacagcctggtcacccgtggctcgttccccgcgctgatgctggcgccggtgaacttcgatgccctgtacgcccaagagctgcagcgcatgcaacaggaaggctcgtcgacggttcagtaatctcgaacccggtgcaggaccccatgtgggagggggcttgcccccgatagcggtagatcagtcacatagatatcgactggtactccgtcatcgggggcaagccccctcccacatttgttatgtgtgttacttgaagcccagctggcgccaaccttcgtagaccgcgacagccacggtgttggacaggttcaagctgcggcacccctcgcgcatcggcaagcgcaggcgatggccgtcgggcagggcgtcgagtacctcggccggcaggcccctgctttcggggccgaacaggaaggcatcgccctcggcaaaactggcatcatggaacggccgcgaacccttggtggtgaacgcgaacagccgtgggtggcccaggctttccaggcaactggccagatcggcgtggcgcttgagcgtggcgtactcgtggtaatccagcccggcgcggcgcaggcgcttgtcgtccatgtcgaagcccagcggctcgatcaaatgcaggtggcagccactgttggcgcacagcctgataacgttgccggtattcggcggaatttctggttgaaaaaggatgacgtgaaacatgcacggctccgaaggcaaagatgcgctgcattctaccctcgaagaggacccgaggccgaagcttatgccgagggtcatgggttctttggcgattgtcggcatgatggtcggcctgatgatcggtcgcctgaccaccccggacccggtcgaactgcaacaggtcgagaccgcagcggacggcgtggtggtgtggttcaacagcgagcccaagctgcacggtgagcatatcgatggcaccgtggcgctgttgttcgacgcccagggcaaggctgcggctgggcgactcaaggtcaatgacaaagacgtgaactggcgcgtacgcaagaccgatggcggcctgttgctgaacctggtggcggctcggccgttgcgtggggagtggaagggcgagaaggccgatggccgctggcggctggagatccatctccaggaggaataaaagagggagttcccggcctgcctgtaccagggctcccaaaacggggtgaagcctcgaaaggcttcggtgttaaagagggaatccccggcctgcctgtaccgaggttcccgaaacggtgtggagcgcgatgcgattcgcatccagcgccccgggtgtaaagaggggattctcggcctgcctgtaccaaggtccccgaaactgggtagtacaggggttattgcagggcgcgtgccagagtggccaggttgtgccaaaaaaaatctgtataaaacgcaaagccccggaatacggggctttggtgcttttggttttcagggttttttcagcagcgctggagttttcggtattggatccgtgcccgatgctagttcatggtgcattgaagcggtgcacctttagccctcgtcggcctcgtcatcatccccgccatcgaccttcatccccaattccttgatcttgcgggtcaaggtattacgtccccagcccagcaatacggcggcatcgcggcggcgcccggcggtgtgcttcaaggcagtctcgatcatgatccgctcaaaggccggcacggcgctgtccagcaggctcgactggccgcgtgccagggcctggtcggcccactggcgcagcgcctgttcccagttggtcacgggtgcagagtcctgcggcaggctcaacagctccggcggcaggtcgctgatatgcacttcgcgcccggatgccatcacggtgatccagcggcaggtgttctccagctggcgaacgttgcccggccacggcaggttcttcaggtattcctcggtctcgcttttcagcagcttcggctcgacggccaactcctgggccgcgcggctgaggaagtggcgggcgagggtcgggatgtcttcgcgacggtccgacatgcgtgggatgtggatacggatcacgttgaggcggtggaacaagtcctcacggaatttgccggcgtgtaccagggtttccaggttctggtgggttgccgcgatgatgcgtacgtcgaccttgaccggcgtgtgcccgccaacgcgatagaactcaccgtcagccagtacccgcagcaggcgggtctgggtgtcggccggcatgtcgccgatttcatcaaggaacagcgtaccgccatcggcctgttcaaagcgcccgcgacgcaggttggctgcgccggtgaacgcgcctttttcatggccgaacagctcggactccatcaagtccttgggaatcgccgccatgttcagcgcgatgaacggcgaagccgcccgcgggctgtgacggtgcagcgcgtgggcgacaagctctttaccggtgccggactcgccgttgatcagcacggtgatgttggagtggctcaaacgcccgatggcgcgaaacacttcctgcatcgccggcgcttcgccgatgatttccggggtgcgggtcagggccggaggggcttcctggttctgctgttcctgggcgtgctggttggcgcgcttgaccagcgccaccgcctcgtccacgtcgaacggcttgggcaggtactcaaaggcgccgccctggtaggacgcgacagcgctgtccaggtccgagtgcgcggtcatgatgatcaccggcaggcgcgggtgctgctcgcgaatccgcgccagcaggtccaggccactggcgccgggcatgcggatgtcggagatgatcacgtcgggctgctggcgcgccagtcggctcatcactccatcggcgctgtcgaagctctgggtggtcatgccttcctgttgcaaggctttctcgaggacccagcggatagaacggtcgtcatcgacgatccagacagtttcactacggctcatgtcgatggggctccttgttccaggggcagaaagatcgagaaggtggtgtggccgggatggctctcacattcgatcagaccctggtgctggctgatgatgttctgggtaatggccaggcccagcccggtaccgtccgggcggccactgaccatgggaaagaaaatggtttcctggagttccgcaggaatccccggaccgttgtcgatgatttcgaccttggtcaccaggcgatggcgcacgtggccgatggtgaactggcgcagggcgcgggtgcgcaggctgatgcgacccaggcgcagctcattctggctgctgatggcctgcatcgcgttgcgcacgatgttgagcaccgcctggatcatctgttcgcggtcgatcagaacgtcagggatgctcgggtcgtagtcacgcaccaaggtgatgcagccctggctttcggcctcgaccagttggcagacgcgctcaagcacttcgtgcacgttggtcatcgccagggacggcaacttgttggagccgagcatgcggtccaccaggttacgcaggcgatcggcctcttcaatgatgacgttggtgtagtccttgaggtgttcctctggcagctcgcgggccagcagttgcgcggcgccgcgaataccgcccagcgggttcttgatctcatgggccaggccgcgtaccagcatcttgctggtttcctgcttggacagttgcgcttcttccttggtgatgcgcagcaggcgatcacgcggatgcacttccagcagtagcaaggtcgcgccgttgctcaggatcggcgtcacggcatagtcgacggtcagcgtctggccggtcagggcggtgagcatcgcttcgcgtttggtgaacgggtgtgcctgctccactgcctggcgcaatgaactcagggcctcggccgactcggtgaacaattcgctgatgaactgcccatggctgcgctggccgctgatggccaggagcatctccgccgccgggttcatgtactcaagacgcaagtcgtcattgagcaggatggtcgcggtggtcaggttgtcgagtagcaaacggtgcagtgcatcgctgatggtcatcaggacctcttttggagcaaggcgcgggcttgaggcacacgctgatacaaggaaaatgcaaaaaccaaaccaaggctccgaaaagaagcgtgaaagccctgaaatgggggtttaaggcgcgaaactgtggcgttctgccagcttgctcgggaagtttcgaaccaaaatgggctggacagctgggaagggtgcagcctatcgcaccaatatagtgcggttttgtgaaggttgttcaggaagtggtgaacggaccgtttccagcgcgagtgaaaatgatccgggagggtcagtgctgctctgacagcggcatgtcctgtgtgcccgcgtaaaacaccaaaagctccaccggggtgtctccggtgacgccgcgatgttcggtactcaccatctcggccagggtttggccttgcctcaaggtgcgcgtagccccactgctgcgggcctcgacggtcagctcacctgaaacgatgtaggcggcgttgggcatggggtgggtgtgccagggcaattgggtgtgcgcagggatcttcaggcgaatcagcgtgagctgcggcgggccggaggggtaggctttgtagggtgtgccatcccacgactcgctgcgttcaagcaaaacctctttctcgatctgtgccgtatcctttgcctgcgtgccgcagcccagcaacgacaagcctaccgcagcagcgatcaagcacttgaaggtgtccatggttccatcctgttcattgagtgaacgctcaggctatggctgtcggcccaggtgacgatgcaggacggttcctcaaatcaggtaggtcgaacgcagagctcggccgtggcacggatcatcgccagttgacgcagcggatcattcagcggctcatgcacggcttcggccagccattgtgggcactgcggatcggtgcgctgcggggtgaagtcagccaattgctgtagcaggcgtttttgcagttcgtccaactgcgggcggatctgtttcaccaggtccgggcgcggatcgttaggtgccttgccctggaactgccagtctgacagacgggtgtactgcaccagcttgttcgcctcgatctgcgccgcgaaaaactgctcaacggcggcaggtgccaagttgtagcccggtgcctgggcgacaacgctggcgatcacttcttgttcgcgctttttgtcctctaccggcttgtggctgtcccatttgctgagggctacctggtcggcgatctccaggcgttcggcgacgctgttgagaaggggctccagagtgggcggcgcagcactcgcactgacgctgacaaataacagagcgaacacaaatcgatgtttcaaaggcgatctcctgtgggagctggcttgcctgcgatgcgggcaactcgatgcatcaggtatacctagctgatgccatcgcaggcaagccagctcccacattttaatggggtttgcaggtctacagcggcgtcagtcagaggctaccttaacttgcgtgcttgcctacagttacgccagaatccgccggcttgtacggctggcttgtcgtctctaaggttgctcggtcgctgctcataagcgatcaggtttagtagcctgagggttaagttaagctcgtaccgcaccgttctttatggtggctgtgtgtagggcatcttcgggtgcgccggcttttgcttaacttccccggtctactaacctgcgcacagccgccaccctaacgtttagtagcgagtcgatggcggcctcacttgaggaagttaagacatgttcaagccaacccccaatccaccaccctctgtcttcaccatcgccgccgatatcgacgacgaagccttgatgatcaataccttcgaaaccctcacctcggtcagcgccctgttgctggatttatccgaggacttgggcggcaagcaccgtgacaccaccttggccattcaccaactgagtgcgttgggcacgcagatggtcggccagatgctcgaccgccatgccccgacccgctaaatcccaggcaaaaaaaagacctcccgagggaggtcttttttcgtcacgccgctcttaaggacgcagcgctaccggatcagcagctgtagtacagctcgtattccagtgggtgtacgaaggtacgcaccttgatttcttcttcgcttttcaggccgatgtaagcgtcgatgaagtcgtcgctgaacacgccgcctttggtcaggaacgcacggcccttgtccagttcttccagggcttctttcaggctgccgcacacttgtgggatctctttggcctcttcaggcggcaggtcgtacaagtttttgtcggcggcatcgccagggtggatcttgttctggataccatccaggccggccatgaccaaggcagcgaaggccaggtatgggttggctgctgggtccgggaagcgggcttcgatacggcgagcacgcgggctggacacgtaaggaatacggatcgaagcggaacggttgcgagccgagtaggccagcattaccggtgcttcgaaacctgggaccagacgcttgtaggagttggtcgacgggttggtgaagccgttcagggccttaccgtgcttgatgatgccgccgatgaagtacagggcggtgtcggacaggccggcataaccttcgccagcgaaggtgttcttgccatctttggcgatggacaggtgaacgtgcatacccgaaccgttatcgccgtaaagaggcttaggcatgaaggtagcggtacggccgtaagccacggcagtgttgtgtacgcagtacttcagggtttgtacttcgtcagccttggcaaccagggtgttgaacttcacaccgatttcgttctgaccggcagtggccacttcgtggtggtgcacttcgatgaccaggcccatgtcttccatggcgttgcacatggaggtacggatttcgtggtcgtggtcgaacggcggaaccgggaagtagccccctttgatacctgggcggtggccatggttgccgccttcaacgtcctggtcggacatccaggagccttgttcggagtagatcttgaacatggaaccggagatgtcggacttgaacttcacttggtcgaagatgaagaattctggctctgggcccacgaatacggtgtcaccgataccggtggacttcaggtattcctcggcacgcttggcgatcgcacgtgggtcgcggtcgtagccttgcatggtcgaaggctcgatcacgtcgcacaccaggatcagggtggcttcttcggtgaacgggtcgagcacggcagtgctgtcgtccggcatcaggatcatgtcggaggcttcgatgcctttccagccggcgatggaggaaccgtcgaacattttgccttcttcgaagaaagcttcatccagcgcgtcgcgagccggcatggtcacgtggtgctgagtgcctttggtgtccgtgaagcgcagatcaatccatttaacgtcatgatctttgatgagttgaaccgacttcgacatagtgtcctccgggtggcttcgggctggggtagtggagttagcccttagaatgtgggtgatgccggcgcggatactccgccatggcaacctgcctcacaagagagcaaattgcatgccagtgcgccaacatgggttttctgctccaaaaacgcccctataaaggtgcattgcgacaaaagcccaaaaatagcgcaccgcaatgtagcgcaaggacgcgtaaatgcacctctttagtgcgttgcgcttgcgatgcatattaactggttaaaccttgagcgatttccgctataatccgcgcccccctttttcagcaggcccggcgcgcgctgtttccatgaaattaatcgttaaagtcttccccgagatcaccatcaaaagccgaccggtacggacgcgtttcatccgtcagttggccaagaacatccgtgccgtgctccgtgacttggacccggctgtggtggtgaacggtgtgtgggacaacctcgagctggaaacccgtgtcaccgagcccaaagccttgaaggacatgaccgagcgcctgagttgcatgccgggcatcgcgcatttcctgcaggtcgatgagtacccgttgggcgacttcgacgacatcaccgagaagtgcaaacagcactatggcagtgagcttgaaggcaagatcttttcggtgcgctgcaagcgtgccggcaagcacagcttcagctccatggatgtcgagaaatacgtcggcagcaagctgcgtcgcgagtgcggcgccgccggaatttccctgaaagcaccgcaaattgaagtgcgcatggaaattcgcgaccaacggttgtttgtgatccacagccagcacaacagcatcggcggttacccgctgggcgccctggaacagaccctggtactgatgtccggcggtttcgattccacggtggcggcctaccagatcatgcgtcgcggcctgatgagccacttctgcttctttaacctgggcgggcgtgcacacgaattgggcgtgatggaagttgcgcactttatctggaagaagtacggcagctcccagcgcgtgctatttgtgagcgtaccgttcgaggaagtgctgggcgaaattctcggcaaagtcgataacggtcatatgggcgtggtattgaagcgtatgatgttgcgcgctgcctcgcggatcgccgaccagttgcagatcgacgcgctggtcaccggtgaagcgatctcccaggtatcgagccagacgctgccgaacctgtcgatcatcgattgcgttaccgagaagctggtactgcgcccactgatcgccagccacaagcaggacatcatcgacctggcagagcagatcggcaccgccgactttgccaagcacatgcctgagtactgcggggtcatctcggtgaaccccaagacccacgccaagcgtcaccgcgtggagcatgaagagaaagaattcgacatggcgatcctggagcgtgcgctcgagaacgccaagctggtcccgatcgatcgcgtgatcgacgaactgggccaggatgtgaagatcgaagaagtcagcgaagccctggccggccagatcgtcatcgatatccgtcacccggatgccgctgaggatgagccgctggaaatcgccggcatcgacgtacaaacgctgccgttctatgcattgaacgcgcgtttcaaggaactggataacagccgtcagtacctgctgtattgcgacaaaggcgtgatgagtcgcctgcatgcccaccatttgctcagtgaggggcatgccaatgtgcgcgtttatcgaccgagctaagagcccggggctgtttgcctgtggcctgcgtcaccggccccccgactctgccgtcaagctgtaacggcaaggcctgactctactgttaatcgctgccacgacctgtcagcacaccgaatcctctgatcgagatacacaagtgatcgaaaatctacgtaacatcgccatcattgctcacgttgaccatggtaaaaccaccctggtagacaaactcctgcgtcaatccggcaccctggagcgcaacgagctcaacgacgagcgcgtgatggactccaacgaccaggaaaaagagcgcggcattaccatcctggcgaaaaacaccgccatcaactggaacggctaccacatcaacatcgtggacaccccgggccacgccgacttcggcggcgaagtagaacgcgtaatgtcgatggttgactccgttctgctgctggttgacgctcaagacggccctatgccgcaaacccgtttcgtgaccaagaaggctttcgaagccggcctgcgtccgatcgtgtgcatcaacaaggttgaccgtccaggcgcgcgtccggactgggttctggaccagatcttcgacctgttcgataacctgggtgccaccgaagaacagctggacttcaaagtcgtctacgcctcggccctgaacggtattgccggtctggaccacaccgacatggctgaagacatgaccccgctgtaccagtcgatcgtcgacaacgtacctgcgccggctgttgaccgtgacggtccgttccagatgcaaatctcggcactggactacaacagcttcctgggtgttatcggcgttggccgtatcgcccgtggtcgcgtcaagccgaacaccccggttgtcgctatcggcgccgacggcaagaagcgcaacggtcgtatcctgaagctgatgggtcaccacggcctgcaccgcatcgacgttgaagaagcagcagctggcgacatcgtgtgcatcagcggcatggactcgctgttcatctccgacaccctgtgccacccggacgcggtagaagcgatgaagcctctgaccgttgacgagccaaccgtttccatgaccttccaggtaaacgactcgcctttctgcggtaaagaaggcaagttcgtgacctcccgtaacatcaaggaacgtctggacaaagagctgctgtacaacgttgcactgcgcgttgaagaaggcgactcggctgacaagttcaaggtatccggccgtggtgagctgcacctctcggtactgatcgaaaccatgcgtcgcgaaggcttcgaaatgggcgttggtcgtccggaagtgatcatccgtcaagttgacggcgtgaagcaggaaccgttcgaaaacgtcaccatcgacacccctgaagaatcccagggcaaggtcatggaagagatgggcctgcgtaagggcgacctgaccaacatggtgccggatggcaaaggccgtgtgcgtctggaatacaacatccctgctcgcggtctgatcggtttccgtaaccagttcctgaccctgaccaacggtgctggcatcctcacctcgatcttcgatcgctacgacaccatgaagtccggcgacatgtccggccgtcagaacggtgttctggtatcggtagaaaccggcaaggcactgacctactccctggaaaccctccaggcacgtggcaagctgttcgttgaacacggtcaagagatctacaacggtcagatcgttggtctgaacagccgtgacaacgacatgggcgtcaacccaaccaaaggcaagaagctcgacaacatgcgtgcttcgggtaaagacgaaaccatcgctctggttccacctgttcgcttcaccctggaacaggccctggaattcatccaggacgacgagctgtgcgaagttacgcctaagtcgatccgcctgcgtaagaagatcctggacgaaggcgagcgtacccgcgctgccaagaaagccaagaactgagttaactctggctgaatgaagaacgcccccggtcgaaaggccgggggcgtttttttatggctgtaggttttgtggtgactgtgccggccctatcgggggcaagccccctcccacattttgaactgtgaacactttcaagtgtgggagggggcttgcccccgatgaggcccttgagagccccacaaaacccggatcagaacttgtcgagggtcttgaacttggtctcgcgcaccacttccttcggcttgtacgcgcaataccccggacgcggcccgattttcgggtggttgcggcaggtgtccgggcgcttgtcataaatagtgcagaagcgcgtcttacgatccaggtacaggcagtcgttgttgctcatgcgctgcaaggtaaaaatctcggatttggaattgaagcgctcgacgatgccttccttctgcaagcgtttggcgatgttcttcggcgggtcgccacgctcgaattcatcgacgataccgatgcggatcaggtccttgatcttcacttcgaccggcagcgtgcagcagctggacacgcaaccaccgcacatatgcgcggaatatttctgccacgtttcaagacggtcgagttccgcggcggcgatcaattgaggcttcatcagggttccaaaaggtggggctgtatccgggcgcgcgatcataccgggattggtgattttttgaacaatattttctgggtttcagctcaaaggctgatcgggcacgacccctgcatctaattcacgcaacggtgaatgagttaaaaaactgccgaaccagcgcgtctaccgtctgtcagaccgtctaggctctagcaactccttctatctcgcccgaggtcgcaattgatgtctcaggaaccacttgcacgagaagcagaggtagccgcattccgcgatgccgtcttgaccaaactcacctacgcggtgggcaaggacccggatcacgccttcgaccatgactggttcgaagccattgccctggccgcccgcgaccagatggtcgaccactggatgaaccatacgcggcgtatctaccgcaaaggccagaaacgcgtttactacctctccctggagttcctgattggccgcctgctctacgacagcctgagcaacctcggcgtgctggagattgcgcgcgaagcgctgtccgagctgggtgtcgacctggagcgcatccgcctgctggagcccgacgcggcgctcggcaacggtggcctgggccgcctggccgcgtgcttcatggaaagcatgtcgaccctgggcattgccggccatggttatggcattcgttatgagcacgggttgttccgtcaggcgatagtcgatggctggcagcaggagcagaccgagcgctggctggatttcggcaacccgtgggagttcgagcgggccgaagtgatttacccgatcggcttcggcggcagcgtcgaaaccctggcggacgcctccggcaagatgatccaggtgtggtcgcccaacgaaaccgtgcgggccgtggcctacgatacgccggtagtcggctggcgcggcgccagcgtcaacaccctgcgcctgtggcgcgcgcgtgcggtggaagacctgcacctggagcgcttcaacgccggtgaccacctgggcgctgtcgccgaagtggcccgtgccgaaagcatctcccgggtgctttacccggccgacagcaccgaagcggggcaggaactgcgcctgcgtcaggaatatttcttcgtctccgcctcgttgcaggacttgctgcgccgtcacaagaacatgcacggctcagtactgagcctgggcgaacacgcggcgatccagctcaacgacacgcacccgtccatcgccgtggccgagttgatgcggcagttggtggatttgcacgatattccgtgggaagcggcttgggacgtcaccgttgaaaccctttcctacaccaaccacaccctgttgcccgaagcattggaaacctggcctgtaggcttgatggaacgcatgttgccccggcacatgcagatcatctacctgatcaacgcccagcacatcgattcgctgcgcgccaaaggtatccacgatttcgatgtgctgcgcgccgtctcactgatcgaagaagacaacggccgccgtgtgcgcatgggtaacctggcgttcctcggctcccacagcgtcaatggtgtatccggcttgcacacccaactgatgcgcagcacggtgttctccgaactgcacaagctgtacccggaacgcatcaacaacaaaaccaacggcattaccttccgccgctggttgtaccaggccaaccccaagctcacgtccatgttggtggaggcgctcggtccggacattctcgacaagcccgagcagcgattggtggagctggagccgtttgccgagaaacaggcgttccgcaaggcgtttgccgaacaacgtttgcacagtaagcgtgcactggccgacatcatccacgagcgcctgggcattgcggtcaacccggcggcgatgttcgacgtgcaggtcaagcgcatccacgaatacaagcgccaactgctcaacctgctgcataccgtggcgctgtaccaggcgatccgtgccgaaccgggcaccgactgggtgccgcgcgtgaagatcttcgcgggcaaggcggcggccagttaccaccaggccaagttgatcatcaaactgaccaacgacatcgcccgcacggtcaataacgacccgaccgtgcgcggtctgctcaaggtggtgttcctgcccaactacaacgtcagcctggcggaaagcatcattccggcggcggacttgtcggagcagatttccaccgccggcttcgaagcctcaggcaccagcaacatgaagttcggcctcaacggcgcgctgaccataggcaccatggacggcgccaacgtggagatgcatgagcgcgtgggtgccgagcacatgtttatctttggcctcagcgcgcaacaggtggaagcccgcaagcatgccggggagttcaacgccgggccggacatcgccgcctcccatcgattgaacgatgtgctgcaagcgatccggggcggggtgttttcgccggatgatccgggccgctatgtggggttgatcgacgggttggtcgattacgaccgtttcctggtatgcgccgacttcgattcgtactgggacgcccaggcacgggtcgaggcgcattggcatgattccaaggcgtggtggcgttcggcggtgctgaacacggcgcggatgggttggttcagctcggaccgcaccatcagggagtacgcgaccgagatctggaaagccctcgactaaacatcgctgatccaaagatgtgggagggggcttgcccccgatagcagcctgtcagtttgcagatatgtcgactggtacaccgctatcgggggcaagccccctcccacattgggcgcgcgtcgatatactgggcgccggtttgcctagggaatatcgaccatgcaatggattttcatgctgattggcttggtgctcggctggacgctcgatgagtcgttcagcgatgcgggcatcggtgcgctgttggggctgggcattggccaggcgatccgcctggcgaagctatcgtcccaggcggaccaacaggcgcgtcagttggaaaccacgcagaagtcgctgatagcgctgggtgagcgcctgcggcaattggaagtgcccacccccgcagctgccagggtttttgtcgagcccgccattgtcgagcccgcacctgtcgtcgaagcgcccgagctggtttgggagttacccgtcgagctgacgcccgtggccatggtcgccgaaccgagccagccgctgcccgatgatgtttgggctccggttccgtcgccgtcccctgaagagcctgccatcccgcgtggccccaacctcatcgagcgtgccctcagcggcgcacgcaattggctgtttggcggcaataccgtgctgcgcgtcggcgtggtgctgctgttcctcggcctggcattcctgctgcgttacgccaccgaaggcatggtggtgccgatcgagctgcgttatgccggcgtagccgctgcggcgttgggcctgctgggcctgggctggtggctgcggctgcgcaacagcaattacggcttgatgctgcagggcaccgggattgccgtgctgtacctgacggtgtttgccgcgatgcgcttgcacccgttgatcgaccccagtgccgcactcggcctgttggttgccgtcaccgtgttctcggcgatcctggcgattacccaggatgcgctgggcctggcctgcgcggcggctctgggtggctttgccgcgccaatcctgacgtccaccggcgctggtaaccatgtggcgctgttcagctattttgccctgctcaatgcgggcatcctcgccatcgcctggttcaaggcctggcgcctgctcaacctgatcggttttgtcggcacctttggtatcggttttgcgtggggcatgcgttcctacacgccggagctgctgtggagcaccgagccgttcctgatcctgtttttcctgatgtacctggccatcggcttgctgttcgcccggcgcaaattgttggagatgcgcgacgcgcccgaggatgacagccgtggtgcgttgctgcgctggtcggcggccaagggggattatgtcgacggcagcatgctgttcggcccgccgctggtgggtttgggcttgcagtttgcgctggtgcagcacctggagtttgccgcggcgttcagcgccctcggcctgggcattatttacatgggactggcgcgactgttgagcggcggtcgcgccttgttgctggcggagacgtgcctggccctgggcgtgattttcgccagcctggctattccgctgggcctagatgcgcgctggaccgctgccgcctgggccgtggagggcgccgggatcttctggctcggtttgcgtcaacagcgaccgctggcacgcgccttcggtttgttgttgcaactgggctcggcgctggcgttcctcagtgagctgcgcatcggtgagcacagcttgctgaatggcgcgccgttgggcgcgctgttgctgggtgcggcgctgctgttcagctttgatcaactgcgcaaggcatccactgagcaggtggcggattgggaacgcagaggcctgccggtgctggcgagcctgggcttgagctttttgtacctgcttgcccccttgctgatggatacccaaggcacggctgtcagttgggcaattgccgggctggcaacgttgttcgtcgggctgcgtatcggttcgcgcaccttcctgttcaccgcgttcgctgtgcaattgctgggcggcgcattgttcctgttgcgtttgcaaggtggcgacggggcggcggtgttcaatgcgggctggagcggcttgttgaccgcttcactggttggcctggcgttgatcggcggcatgctgctggcggcgcgtgacgccatggtgcgcagtgacgtgcggctgttgcgcgggttgtcggtggtgctgttggcgggcctggtattgatcaacctcgcggtgctgttcgtgctgccgtgggaaagcgccagcggtgtgtgggcggccagtggtttgctgatcatctggctgagcctgtacctgcaacaacgtgtcagctttgtattcggcctgctgctgcaagtggtcggcggcggttcgttcctgctggcggtgcccgagctgctcgggccgttgtccggtgaggggctgcgcccgttggcccacagcggtttctggacaccgatggtgctgggcctggcggcaatggtcggcgcctggcgcttgcagcgtgaaccccatgcgccggtgtttgccgcgttgaagctgcagcggttgtccgacgtgctgttggtgtggggcgcggcgtggtggacgttggcgctggctggcgaagtgttgcggtttattccgcaggaattgctgggtgcgttcctgctgggatgcgcggcgatcagcgtggcgacctgggcgctgctggcctcgcgcctcaagtgggtgtcgctgggcgtgctgtgtacgttgctgatgccggcggtgggcgtggtgctgctggtgtgcgcacatacctattaccacccggcggcgcagtacggctggctggcgtggccggcggtctttgtggtgcatttcatctcgttgcggcgtttggcgacgctcgttcccgccaaggcgctgagcgtggcccacgtgctcggctgctggatgctgatcggcatgctggcgctggagttgcgctacggtctgctcaggttctctgccgaatacaacgcctggcgctggctgggctgggcgatcctgccaagtctctaccttatgctggctgccgcgccgcgccattggccatggccggtctcggcgtacccaagggaatatcgagtgttggcggccgtgccattggcggtgctgatgctcggttggttctggctggcgaacagcttcagcgatggcaccgccaggccgctgccctatgtgccgctgatcaacccgctggacctgggcctgctgttcgcgctgctgggcgtgtatgtgtgcgcacgaagtgtcgcgccgctacgcgggccgcgtgccgagctgatcgcacaaggcgtcgctgggctttcgctgtttgccttctttaccgcgttggtgatgcgcacggcccaccattggggcggtgtgccgtttcaattggatgcgttgctggagtcgatgctggtgcaggccggcctgtcgatcgtctggaccctgatcgccctcggcctgatgatcggcggccacctgcgccatcgccgcgaagtgtggctgatcggcgcggtgctgattgcggtggtggtggccaagctgttctttgtcgaattgagtaaccgcggcggcttggcgcggatcgtgtcgtttatcggcgtgggcgggttgttgctggtggtgggctactttgcgccgcttccgcccaaacgcgccgaagcggtgttggaaactgaaggagcatcctcttgatcggtaagttgagcgtggccgtgctgggcctgtgtacgaccttgtccgtgtgggcgcaggaaacgcccgccgacttcaccacccaggtgccgctgagcgtcagtggcaacggcccttggtatcgcctggagttgccactggcggtgcaattgaacgcgcgccaggcggatctcgccgatgtgcgggtgttcaacgccgccggcgagccccaggcctatgcgttgtcgcgccaggcgtcgcagcgcaccgaaagccgcgaagttaccgatgtgaagtggttcccgctgtacgccgccgacacccagcaagccctgcccgaggtggtgatgaaagccaccaccaccggcaccctggtggaaatcaaaccctcgaacgcaccaaaacccggcaagcaagtactgcgtggctgggtgttggacgccagtgcgatcaaggcgcccttgcagcaattgagcctggactggagccgcgagcaggagggcttccagcgtttcagcatcgaggccagtgatgacttgcagcattgggacgcctggggcgatgggcaggtggcgcgcttatcgtttgccgatgagcgggtcgagcagcatgacgtgaacttgcccgggcaatcggcgcgctacctgcggctggtctggcagggccaggcggcgccgttgctgacctcggccaagctggtgagcgctacccgcagcagcgtgccgctgccgttggtgtggtcgccgccgctggcgggtaagcggctcagcgccggggaatacagttggcagttgcctgcggggctgagtctcgaacgcttgcgcatcgagctcaagcaacccaacacgctggcgcccgtgacgttatccggtcgaagggacagcaagcaggcctggcaaccattgagcaatggcttgctgtatcgcctgacccagaatggccaggacgtggtgcaggatgaactgcagttgccggggcaaacggtggccgagctcaaattgcaggtggatgagcgcggtggcggcctgggcgtcgaagcgcccgccctgcgctttgcggtgcgcgccacgcagttggtgttcctggcgcggggtgaggcaccgtttacgctggcgctgggcaatgcgtcggccaaggcggcaagcctgccgctgtcgaccctgatcccggactacaaacccgagcgcttcaagacgctggggcaggccaaggtcgccggggaagtcgcggtcacgccggttgcggtggtaggcgctgccgatgccgggacgaactggaaaaagctcgggctctgggccgtgctgctgctcggcgtggcggcactgggcgccatggcctacagtttgctgcgcaagccgccggcggcacgttaaataaagtccatgaactctattgggtttaaatcctctgataggaggaaatacgccccgactcgcgttaaactgcgcgggttttcaagccccccattctccggagccttacatgtcccgcgttaccttgagtcgctatttgatcgagcagacccgcagcaacaacacgcctgccgatctgcgcttccttatcgaagtggtggcgcgtgcttgcaaggaaatcagccacgccgtgtccaaaggcgcactgggtggtgtcctgggcagcatgggcactgaaaacgtgcagggcgaagtgcagaagaagctcgacgtcctgtccaacgagatcctgctcgaagccaacgaatggggcggtcacctggccggcatggcgtccgaagaaatggacaatgcctaccagatccccggcaaatacccgaaaggcgcgtacctgctggtattcgacccgctggacggttcgtccaacatcgacatcaacgcaccggttggcaccatcttctcggtactgcgttgcccgaacgaatacctgagccagaacgaagcgctgaacgaaaaggccttcctgcagccaggcaccgagcaggtggctgccggctacgccatctacggcccgcagaccatgctggtgctgaccctgggtgatggcgtcaaaggcttcaccctggaccgtgaaatgggcagcttcgtactgacccacgaagacatctccattcctgcatcgacccaggaatttgcgatcaacatgtccaaccagcgccactgggaagaaccggtgaagcgctacgtcaacgagttgatggaaggcgaagaaggcccgttgaagaaaaacttcaacatgcgttgggtggccgcgatggtcgccgacgtgcaccgtatcctgacccgtggtggcttgttcatgtacccacgcgacagccgcgagccatccaagccgggcaaactgcgcctgatgtacgaagccaacccgatgtcgttcctggtggagcaggcaggcggtgcgtccactgacggccaccagcgcatcctcgacatccagccggaaggcctgcaccagcgtgtggcggtgttcctgggttcgaaggaagaagttgagcgcgtgaccgcttaccacaagaagtaagctgcggcgacaagtgaccggcgttgttgtgagccggttcacccttgaagaagccccgaaacgtttcagcgttttcggggcttttttgtttttgctcatcgggaaccagacacctcttttcccttctaagcttctggcagatacccacgctgcttcgtccctccaggagtgtttccatgtcgttacgccgtctcgcgttgctggctttttgcgtgctgttggccgcttgcagcaaggtcaaccaagaaaactatcaaaaattgtcggctggcatggccaaggctgaggtggagtcattgttgggcaagccgaccgattgttccggcgcactgggtatgtccagttgcacctggggcgataaaaacagctttatcagcgttcaatatgccggtgacaaggttctgatgttttccgggcaaggcctgaagtaaaccggggcgcaagcctgcgggagaagaagaatgatgcgttttgttttgttcctttgtgccagcctgtttttggcgggctgtgccagccattctggcgatgatctgcaacccaagacagcgagcaacgtcaacctcaagcgttaccagggcacctggtatgagttggcccgattgccgatgtacttccagcgcaactgtgcgcagtccgaagcccgttacaccctgttgcctgacggcgacatgtcggtgttcaaccgctgcttgacgaccgagtggaagtgggaagaagccaagggcaccgccaccccgcaagtgccgggcaagaccgacaagctctgggtggaattcaacaactggttcacctcgctgctgccgggcgtcgccaagggcgattactgggtgctgtatgtcagcgatgactacaagaccgccattgtgggcagcccgagccgacgctacatgtggatcctgtcacgcacgccgacggtcaatgcggacacccgcgaagacctgctgagcagggcgcggcaacaggggtatgacaccacacggttgatctggcgtacgtcggacaagcagatggcgaagacttcgcaataagtctggatcaccaccgatccaattgtgggagggggcttgcccccgattgcagtgtgtcagtcagcacatctgattctgatacatcgctatcgggggcaagccccctcccaccgtttttaaccgagtaaatgcctcaagacctgtgtgaacgctcggctgctttcttcttcgccggcatgatgcccatcgcgcaccacccactctccattcaccagcacatcccgcacctgccgatcaccaccggcgaacaaccagcgattcagaatcccgtcctcggtcgccgtcgccaggtacggatcattgccgtccaggacaatccaatccgcacgcttgcccgcttccagccgcccaatcagctggcctagcgcctgcgcgccgccatccagcgcggcatcgaacagcgtgcgcccgaccatcggctgatcactgcgatacagacgattgcgccgctgatcacgcaggcgctggccatattccaaccagcgcaattcctccaccacgctcaacgacacatggctgtcggacccaatccccatgcgcccgccctgtgcgaggaaatccaccgccgggaaaatcccatcacccaggttggcctcggtggtcaggcacaaaccggcaatcgcccggctcttggccatgcgcgtcacctcatcggcatcggcatgggtggcatgcaccaggcaccagcgttcattgacgtcgatattgtcatatagccattgcagtgggcgcttgccgctccaggccaggcagtcgtcgacttccttctgctgctcggcgatgtggatatgcaccgggcaggtcttgtcgctggccgtcagcacttcgctgatttgctgcggcgtgaccgcgcgcagggagtggaagcacaggcccagcgcttgcgccggttgcgcggcgaggatcggcttgaggcgcgcttgcaggtccaggtagttttccgtgctgttgatgaaccggcgctggccctcgttcggcgcttgcccaccaaaacctgaatgggtgtagagcaccggcaacaacgtcaaaccgatcccgctgctggccgccgcctggctgatctgccgtgacagttccgtgcgatcggcatagggctggccgctgacgtcatggtgcacataatgaaattccgccaccgatgtgtagccggccttgagcatctcgatatacagctggcgcgcgatgacctggagttggtccgggttgatcttgccgaccatgcgatacatcaggtcgcgccaggtccagaaactgtcattcgggttgccggccacttcggccaatcccgccatggcacgctggaaggcatgggaatgcaggttcggcatgcccgccaacaccgggcctctcagccgttctgcaccctctgcactggcattggcctcaacgttggtcagcaagccatcggcgctgacttcaagacgtacatcattggcccatccattaggcagcagcgcgcgttcggcaaagaaagcggacatgatcaaggcaccccggtcgtgtgtttatttgtatatacatatacagacgtttgcctgctcggtaaactccggcaatctatgcatcttttccccctgcaaggattccctgtgccgactccgcccgccaactcttcgctggctgcccacatggacgaaagtccggcgcccttgtacgcccgcgtcaaacagatgatcagccagcagattctcaacggcaactggccgccccattaccgcgtgccttcggagagcgaactggtcagccagctgggtttcagccgcatgaccatcaaccgcgccctgcgtgagctcaccgccgaagggttgttggtgcgcatgcaaggcgtcggcacctttgtcgccgaacccaagagccagtcggcgctgttcgaggtgcacaacatcgccgatgagatcgcctcccgtggtcaccggcatacctgccaagtcatcaccctgggtgaagaggctgccggttccgagcgcgccgttgccctggagatgcgcgaaggcgggcgggtgtttcactcgctgatcgtgcacttcgaaaacgatattcccgtgcaaatcgaagaccgtttcgtcaacgccctggtcgcgccggaatacctgcaacaggatttcacccagcaaacgccctacgcctacctgaaccaggtggcgccgctgaccgaaggcgagcatgtggtcgaagccatcctcgccgatgcggccgagtgcaaactgctgcagatcgaacccggcgagccgtgcctgttgattcgccggcgcacctggtcgggccgccagccggtgaccgccgcgcgtttgatccaccccggttcccgccacagcctggaaggacgcttcagcaaatgagtagcgtaaaagtctggcgcgccgccgagtacgtgcgcatgccgtggaaaaacggcggcggcagtaccgaagaaatcacccgtgatgcaggtgcagggctggatggctttggctggcgcttgtcgattgcggatatcgctgagtcgggtggcttttccacctttgccggttaccagcgtgtcatcaccgtgatccagggcgccggcatggtgctgaccgtggatggcgaagagcagcgcgggttgttaccgctgcaaccctttgcgttcaagggtgacagccaggtggcatgccgcttgatcaccgggccgatccgcgacttcaacctgatctactcgccacagcgttaccacgcgaggctgcaatgggtggacggtgtgcagcggttcttcagtaccgcgcagaccgtgctggtgttcagcgttgctgatgaagtgaaggtgctggaccacaagctcggccatcacgactgcctgcagatccacggtaacaccggcctgctggacctcgccgtcagcggccgcagctgtattatcgaactgacccaactcggttaaaaaatgtgggagggggcttgcccccgattgcagtgtgtcagccagcctatcgggtactgatacaacgccatcgggggcaagccccctcccacatttgtttcccgctgttcttgatagctgtttcctgagcgcgcaccactttgttaccgaatgccccagcgtggcgcaaaaccatgctttcgcgataaccccgcccaaccactaacgcctcccgtaagaaatttcatcacgcctctacaccttgattttcaaggctcacacgcgctttccaaaaaatccaaacgcctcgccgaaaaagttggccgcttgattgcatatgcttgtatgtacaagtaaagatgtgtgcgtaagactctgcttcgcaccatccatgttcgcgcatcgatcgccgaggagtcctagcagtgaccaagcctacaaaataccgtgacgtcgaaatccgtgccgcccacggtaacaagctcaccgccaaaagctggctgactgaagcgccgctgcgcatgctgatgaacaaccttgacccacaagtggccgagaacccgaaagaactggtggtgtacggcggtattggccgtgcagcacgcaactgggagtgctacgaccagatcgtcgagagcctcactaacctgaatgacgacgaaaccctgctggtgcaatccggcaaaccggtcggcgtgttcaagacccacagcaacgccccgcgtgtactgatcgccaactccaacctggtgccgcactgggccagctgggaacacttcaacgaactggatgccaagggcctggccatgtacggccagatgaccgccggcagctggatctatatcggcagccagggcatcgtccagggcacttacgaaaccttcgtcgaagccggtcgccagcactacaacagtgaccttaaaggccgttgggtactgactgccggcctcggcggcatgggcggcgcccagccgctggcggccaccctggccggcgcctgctcgctgaacatcgagtgccagcaggtcagcatcgacttccgcctgaacagccgctatgtcgacgaacaagccaccgacctcgacgacgccctggcgcgtatcgccaagtacaccaaggaaggcaaggccatctccatcgccctgctgggcaacgccgccgaaatcctgccggaactggtcaagcgtggcgtacgcccggacatggtcaccgaccagaccagcgcccacgaccccctcaacggttacctgccggcgggctggacctgggacgaataccgcgcccgcgccaagaccgagcccgctgccgtgatcaaggccgccaagcagtccatggccgtgcacgtcaaagccatgctcgagttccagaaacaaggcatcccgactttcgactacggcaacaacatccgccagatggcccaggaagaaggcgtggaaaacgctttcgatttcccgggtttcgtcccggcctacatccgcccgctgttctgccgtggcatcggcccgttccgctgggcggcactgtccggtgacccgcaggacatctacaagaccgacgccaaagtcaaagagctgatcccggacgacgcgcacttgcataactggctggacatggcccgcgaacgcatcagcttccagggcttgccggcacgtatctgctgggttggcctgggtcagcgcgccaagctcggcctggcgttcaacgaaatggtgcgcagcggcgagttgtcggcaccggtggtgatcggccgtgaccacctcgactccggctcggtcgccagcccgaaccgcgaaaccgaagccatgcaggacggttccgacgccgtgtccgactggccgctgctcaacgccctgctcaacactgcgagcggcgcgacctgggtatcgctgcaccacggcggcggcgtgggcatgggcttctcccagcactccgggatggtcatcgtctgcgacggcaccgacgaagcggctgagcggatcgcccgtgtgctgcacaacgacccggccaccggtgtgatgcgccatgcggatgccggttaccagatcgcgattgattgcgccaaggagcagggcttgaacctgccgatgatcaagtaagccagtaccaccctgaaacaatccatcagaggttgaaccgacatggctgcaaatgacaccaccccgttgatcgaaaggcgttcgatcgactacatcccggaagccgaaagacacggtcgtctgttcagccagttcaccctgtggatgggcgccaacctgcagatcaccgcgattgtcaccggggccttggccgtggtgctgggcggcgatgtgttctggtcgttgatcggtctgttgatcggtcaactgatcggcggtggggtcatggcgttgcatgcggcgcaagggcccaagctgggcctgccgcagatgatttccagccgggtgcagttcggtgtgtatggcgcggccatccctattgtgctggtgtgcctgatgtacctgggcttcaccgccactggcaccgtgctttcggggcaggcgctgggccagttgttcggggtcagcgacagcgtcggcatcctgattttcgccagcgtcatcgtgttggtcacggtgctcggctaccgggtgatccatttcatcgggcgtgtcgccagcgtgattggcgtgattgcctttgtgtacctgttcagccgtctgatgagccagaccgatgtgggcgcgctcctgcagatccgccacttcagctggagcagtttcctgctggcggtgtcgctcgcggcctcctggcagatcgcattcggcccgtacgtggcggactattcgcgctacctgccgagcaagacctcgtcggtgaaaacctttttcgccgccggtgcaggttcggtggtgggcgcgcaggtggcgatggtgctcggcgtgtttgccgcggccatgtccaacggtcagttcgccgggcatgaagtggcctacatcgtgggcttgagtggcaccggtgctaccgctgcgctgctgtacttcagcatcgcattcggcaaggtcaccatctcgacgctgaactcctacggcagcttcatgtgcatcgcgaccatcgtcagcggctttcgtggccgcctggaggtcacgcgcctgcaacgcctggtgttcgtgctggcgattgtcggtacggcgaccctgatcgcattgctcggccagcactcgttcctgggggcgttcaagtccttcatcctgttcctgctggcgttcttcacgccctggagcgcgatcaacctggtggactactactgcatcacccgcgagcgctatgacgtaccagcgctggccgacccgaacggtcgctacgggcgctggaacctgctcggtatcagcgtgtatgtgttcggcgtgctggtgcagttgccgttcatctccaccaagttctacacaggtcccttggtggccgcgctgggtgatgtggatatctcctggatcatcggcctggtactgcccgcagcgctgtattacctgtgtgcgaaaaaatggcacggcaccgtgcccgatcaactgatcctgccaacagagcagggcgctatacccacaacaaacgggctggctgcacaggcctgatgggacgtggacagggcaggatgcctactgactgccgtaatccatttcaagattgggagcgtcacaacaatgaaaatgcataagaccctgatggctaccttgctctctgcaggcttgctggccagcgctggcgcccaggcagccggttggtgcgaatccggcaagccggtgaaattcgccggcctgaactgggagagcggcatgttgctcaccgacatcctgcaaaccgtgctggaaaaaggctacgactgcaaaaccgacagcttgccgggcaactccatcaccatggaaaacgccctgagcagcaacgacatccaggtgtttgccgaagagtgggtcggccgcagtgaagtctggaacaaggccgagaaggccggcaaagtcgtcggcgtcggcgccccggttgtgggcgctatcgaaggctggtacgtgccgcgttatgtgatcgaaggcgatgccaagcgcaagctggagcccaaggccccggagctgaaaaccatcgccgacctggccaagtacgcctcggtgttcaaggaccaggaagagccctccaagggccgcttctacaactgcccggccggctggacttgcgagctggacaacagcgagatgctgaaaagctacggcctggaaagcacctacaccaacttccgcccaggcaccggcccggcgctggatgcggcggtgctgtcgagctacaagcgtggcgagccgatcctgttctactactggtcgcccacgccgctgatgggccaggtcgacctggtcaagctcgaagaaaaacccggtgtggataaaagcgtgagcatcaaggtcggcctgtccaagaccttccacgaacaagccccggaactggtggccgtgctggaaaaggtcaacctgcccatcgacctgttgaaccagaacctgggccgcatggccaaggagcgaattgagtcgccaaaactggcgaaaattttcctcaaggaacatcctgaagtctggcacgcctgggtgagcgacgacgcagccaagaaaatcgacgcggccttgtaggtcaagcgtgcccggctaccctgaggggcagccgggcgcctggccacaacccactggatcgagagcacgatatgtttcctgagagttttacgttttccatcgccgactgggtcaacggttgggtggactcactggtcaccaactacggtgatgtgttccggcacatttccgacaccctgctgtgggccatcgtcaacctggaagggttgctgcgcgcagcgccgtggtggctgatgctggccattgtcggcgccgtcgcctggcacgcgacccgcaaggtggtgaccacggcagtgatcgtcggcctgctgttcctggtgggcgcggttggcctgtgggacaagctgatgcagaccctggccttgatgatggtcgccacggtgatctcggtgctgatcggcattccgctgggcatcttgtcggcgcgcagcaatcgcctgcgttcggtgctgatgccgctgctcgacatcatgcagaccatgccgagttttgtgtacctgatcccggtgctgatgctgttcggcctgggcaaggtcccggcgattttcgccacggtgatctacgccgcgccaccgctgattcgcctcacagacctgggcattcgccaggtcgacggcgaagtcatggaagccatcaacgccttcggggccaaccgttggcagcaactgttcggcgtgcaactgccactggcgttgccgagcatcatggccggtatcaaccagaccaccatgatggcgctgtcgatggtggtgatcgcctcgatgatcggcgcccgaggcttgggtgaagatgtgctcgtcggcatccagaccctcaacgtcggccgtggcctcgaagccgggctggcgatcgtgattctcgcagtggtcatcgaccgcattacccaggcctatggtcgtccacggcatgaggcgagcaaatgactactgtcagcaaaatcgaagtcaaaaacgtcttcaagatcttcggcgcccgctccaaggatgcgctgtcgttgatcggccagggcaagaccaaggaccaggtgctggccgaaaccggctgcgtggtcggtgtgaacgacctgtccctgagcatcggcactggcgagatcttcgtgatcatgggcctatcgggttccggcaagtccactctggtgcgccacttcaaccgcctgatcgaccccaccagcggcgcgatcctggtggacggtgaagacatcctgcaactggacatggaagccctgcgccaattccgtcggcacaagatcagcatggtgttccagagcttcggcctgttgccccacaagagcgtgctcgacaacgtcgcctacggcctgaaagtgcgtggcgaaaccaaacaggtgtgcgccgaacgcgccctgcactggatcgaaaccgtgggcctcaagggctacgaaaacaaatacccgcaccagctttccggcggcatgcgccagcgtgtcggcctggcccgtgcgttagcggccgacaccgacatcatcctgatggacgaagccttcagcgccctcgacccactgatccgcgccgagatgcaggaccagttgctggagctgcaaaagaccctgcacaaaaccatcgtgttcatcacccacgacctcgacgaggccgtgcgcatcggcaaccgcattgcaatcctcaaggacggcaagttgatccaggtcggcacgccgcgggagatcctgcattcgccggcggatgagtatgtggatcggtttgtccagcggcgggcggcggtggtctgagctggaattgttggtgaggctgatggcctcatcgggggcaagccccctcccacaggggaatgcattccaaatgtgggagggggcttgcccccgataggtccggcagagctgcacaaaaattcaagaaggtatgaagatgccccaggcaacaaaaatcaccatcgccaacgccccgctgcgctggcaggacgtcgtcgccgtcgcccgccacggcgcggtgctcgaactctcgggccaggcctgggcgcgcatcgacaatgcccaggccatcgtgcagcgcatcgtcaccagcggtgagcgcgcctatggcgtgaacaccggcctgggcgcgctgtgcaatgtgtcgctcaagggcgagcaactcagccaactctcgcgcaacaccttgctcagccacgcctgtggcgtcggcccggtgttgagcgacgaacagacccgcgcgatcatctgcgccgccatcatcaactacagccacggcaaatccggcctgcatccgcaggtggtgcattcgctgctggcgctgctcaaccacggcatcacgccgcaagtgccgtcccagggctcggtgggttacctgacccatatggcccatgttggcgtggcgctgctgggtgtgggcaatgtgagttaccaaggtcggatcgttccggctcaagaggcattgaacgcggaaggtctgcagccggtggtgctcggcgccaaggacggtctgtgcctggtcaacggcacgccgtgcatgactggcctgagctgtctggccctggccgacgcgcatcacttgctgcaatgggccgacgtgatcggcgccatgagcttcgaagcccagcgtggtcagatcgatgccttcgatgaagaaatcatcgccctcaagccgcaccccggcatgcagcaagtgggtatcaacctgcgcgccctgcttgatggcagcgaagtgatcgccagcagcaagggcattcgcacacaggatgcgttaagcattcgctcgatcccgcagatccatggcgcggcacgcgaccaggtagagcacgccacgcgccagatcgagactgaactcaacagcgccaccgacaacccgctggtgctcggcacaccggaacactaccgcgtggtgtcccaggccaacccgcatggccagtccgtggccttggcggcggacatgctggcgattgccatggccgaaatcggcgcggtggccgaacgtcgcctggaccgcctgatcaacccgcacgtcagcggcttgccggcgttcctggtcagcaaccctggggtcaactccgggatgatgatcgtgcagtacgtcgccgcctcgctgtgcgggcaaaaccgccaattggcgcaaccggcggtgctcgacaacttcgtcacctcgggcctgcaggaagaccacctgagcatgggcaccaatgcggcgctcaagctgcaccaggtgctggccaacgtgacccagattctcgccatcgagtacttgttggcggcccaggcgttcgagtttctcaaggaacaacgtttcggcgtcggcaccgaacgtgcctggcgtctgctgcgcgacgtcgtgccggcctatgaacaggaccgttggctggcgccggacattgccgccgccgctcaactgctgaaaaacaccgatttaccgaatgtgcacttttaaaagaacaattcagaaggagtatgaatgtgactgcgctaaacctgattccaggccaactgagccttgcccaactgcgagccatctaccagcagccggtaaccctcagtctggatgacagcgccacggcgcagatcgaagccagtgtggcctgcgtggagcagattctcgccgagaaccgcaccgcctacggtatcaacaccggtttcggcctgctggcctcgacccgcatcgccagcgaagacctggaaaaccttcagcgttcgctggtgctgtcccacgccgctggcgtcggtgagccgatcagcgatgcgctggtgcggttggtcatggtgctcaaggtcaacagcctgagccgtgggttctccggcattcgtcgacaggtgatcgacgcactgatcgcgctgatcaacgccgaggtgtacccgcatattccgctgaaaggttcggtgggtgcctccggcgacctggcgccgttggcgcacatgtccctggtgctgctgggcgaaggcaaggcacgctacaaaggcgagtggctggaagcgactgacgcgctgaaagtcgccggcctcacgccgctgacccttgccgccaaagaaggcctggcgctgctcaacggcacccaggtgtcgacggcctatgccctgcgtggcctgtttgaaggcgaagacctgttcgccggcgccctggcctgcggcggcctcaccgtggaggcggtgctgggttcgcgttcgccattcgatgcgcgcatccatgcggcacgcggccagcgcgggcagatcgattcggcggcagcctaccgtgacctgctcggcgacagcagccaggtgtcccagtcgcaccagaactgcgacaaggtgcaagacccgtactcgctgcgctgccagccacaagtcatgggcgcctgcctgacccagttccgccaggcagccgaagtgctggtggtcgaggccaacgccgtgtcggacaacccgctggtatttgccgctgaaggcgatgtgatctccggcggcaacttccacgccgaaccggtggccatggcggccgacaacatggcgctggccatcgccgagatcggctcgctgagtgagcgccgcatctcgttgatgatggacaagcacatgtcgcaactgccgccgttcctggtgggcaatggcggtgtgaactccggcttcatgatcgcccaggtgaccgctgccgcgctcgccagcgagaacaaggcgttgtctcatccccatagcgtcgacagcctgccgacctccgccaaccaggaagaccacgtgtcgatggccccggctgcgggcaaacgcctgtgggaaatggctgagaacacccgtggcattctcgcggttgagtggctggccgcgtgccagggcctggacctgcgcgaaggcctgaaaacttcgccgaagctggaaaaggcgcgtggcatcctgcgcagcaaagtggcgttctacgacaaggaccgctttttcgcgccggacatcaacgccgccagcgaactgctcgccactcgctgcctgaatgagctggtgccggccaagctgctgccgagcctgtaaccgccacaccctgtagtgagcgggcttgccccgcgctgggctgcgnnnnnnnnnnnnnnnnnnnnnnnnnnnnnnnnnnnnnnnnnnnnnnnnnnnnnnnnnnnnnnnnnnncgcagcccagcgcggggcaagcccgctcactacagttgtcaggcaactggctctaaattttctcaggataaaaataattaaggacgagaaatgcaccagcaagaaaaaggtttgaaacgcgggctcagcgcccgacatattcgcttcatggcactcggttccgcgatcggtaccgggttgttctatggctctgcctcggccatccagatggccggccccgctgtgctgctggcctacctgatcggcggcgccgccgtgttcatggtgatgcgcgccctcggcgaaatggccgtgcacaacccggtggccggctccttcggccagtacgccagcacctacctgggccccatggccgggtttatcctcggttggacctacgcgtttgaaatgatcatcgtgtgcctggccgacgtcaccgccttcggcatctacatgggcttctggtttcccgaggttgcgcgttgggtctgggtgctcggcattgtgtttttgatcggcggcctgaacctgtgcaacgtcaaagtgtttggtgaaatggagttctggctgtcgctgctcaaggtcggcgccatcgtggcgatgatcctcggcggcttcggcatcatgctgttcggcatccactcggccggtgagacccaggccagtggcctcagcaacctgtgggcccacggcggcttcatgcccaatggcatcggcggcctgatcgcttcgtttgcagtggtgatgtttgccttcggcggcatcgaaatcatcggcatcaccgccggcgaagccaaggacccgcagcgcgtgatccccaaggcgatcaacgcggtgccactgcgcatcctgttgttctacgtgctgaccctgttcgtgctgatggccatctatccgtggccgcagatcggcagccagggcagcccgttcgtgcagatcttcagcaacctgggcattggctcggcggcgaccatcctcaatatcgtggtgatctcggccgctgtttcggccatcaacagcgacatcttcggcgccggccgcatgatgtacggcctggcccagcaggggcaggcacccaagggcttcgcgcaactgtcgaaacacggtgtgccgtggatgactgtggtggtgatgggcgcagccttgctgggtggggtggtgctcaactacctgatcccggaaaacgtattcctgctgatcgcctcgattgccaccttcgccaccgtgtgggtgtggctgatgatcctgttcacccaggtcgccatgcgccgctcgatgaccaagcagcaagtcgctgagctgaagttcccggtgccgttctggccctatgcgccggcggccgccatcgtattcatgctgttcgtgtttggtgtgctgggttacttcccggacacccaggctgccttgctggtcggtgccgtatggatcgtgctgttggtggtggcctacctgctgtgggtcaaacccgctgccgggcaagcggccaaggtccattacgacccggctttgtctcatcgttaatctagggaggcgttgatgaaaacgctttggcaacactgccacgtcgcaaccatggcccagggcaagtactcgatcatcgaggatgccgccatggtcaccgcgggttcgctcatcgagtggatcggcccccgcagccaggcacccacggcggattacgcccaggtgcatgacctgcacggcgcgtgggtcacccccgggctgatcgactgccacacccacacggtgttcggcggtaaccgcagcggcgaattcgagcaacgcctcgaaggcgtcagctacgccgagatcgcggccaagggcggtggtattgccagcacggtgcgcgccactcgcgccgcaaccgaagatgagctgtttgccagtgctgaaaaacgcctgcgcagtctgctgcgtgatggcgtcaccaccgtggagatcaagtccggctacggcctggacctagccaacgaacgcaagatgctgcgtgtggcccgtcgcctcggtgaagcgctgccggtcagcgtgcgcgccacgtgcctggcggcccatgcgttgccgccggagtacaaggaccgcgccgacgactacatcgaccatatctgcgccgacatgctgccggccctggcggcggaagggctggtggacgcggtggatgcgttctgtgagtacctggcgttctccaccgaacaggtggagcgcgtgttcaaagttgcccagcaactcggcctgccggtgaaactgcacgccgagcagctctcttcgttgcacggttccagcctggccgcgcgttaccaggcattgtcggcggatcacctggaattcatgaccgaagaagatgccatcgccatggccgcttccggcaccgtcgcggtgttgctgccgggcgccttctacttcctgcgcgaaacccaattgccgccgatggaggccctgcgcaagcacggcgtgaaaattgccatcgccagcgacctcaaccccggtacttcgccggcgttgtcggtacgcctgatgctgaacatggcctgcaccctgttccgcatgaccccggaagaagccctggccggtgccacgcaacatgcggctaccgcattaggcatgggcgacacccacggttcgctggaggtgggcaaggtcgcggattttgtcgcttggcagattgatcgtcccgccgacctggcgtactggctgggtggcgagctggataaacgcgtcgtgcgccatggcgtcgacgccactgtatgaggagtactgcttgtggataaggttctgaacttcaaacaaggccgcgtgccgctgctgatcagcatgccccatgccggcctgcgcgtgacgcctgcggtcgaagccgggttgatccccgaggcgcaaagcctgccggataccgattggcacattcctgcgctgtatgacttcgccgaagagctgggcgccagcaccctggccgccgaatactcgcggtttatcatcgacctgaaccggccgtccgacgacaagccgttgtacgccggtgcgaccaccgggctgtacccggcgacgctgttcgacggcgtgccgttgttccgcgaagggctggagccgtcccaggaggaacgcgtcagctatctgcagaaaatctgggggccgtaccaccgtgccctgcaagaagagctagcacgcctcaaggccgaattcggctacgccttgctgttcgatgcacactcgatccgctcggtgatcccgcacctgttcgacggcaagctgccggacttcaaccttggcactttcaatggcgccgcgtgtgatcccgaattggccagccaattggaagccatttgcgccgcgcatccgcagtactcccatgtattgaacggacgcttcaagggcggccacatcactcggcattacggcgacccggcgcaggatatccacgcggtgcagttggagttgtgccagagcacttatatggaagaggttgagccgttccgatatcgccctgatttggccgagccgacgcgggtggtgctgaagcaattgctggaagggctattggcctgggggcaagcgcgttatcggtgaattgcggggctgctggaatagctatcgggggcaagccccctcccaccttttgatttatgaacccagtcaaatgtgggagggggcttgcccccgatggcggtctcaccgtcgccccagtgcaactgccggtcgccacagttcgtgttgaatgcattttcactgcgtaaggttgttgaataaaaacagccgagtgagcgctcatccatgaaaaaactgttgttgcccctcacctgtgtcgcactgctcagtgcacacgccatggccgccgaaccggcctcctgcaaaagcatccgcatgggcgtggtcagctggaccgatgtgatcgccacctccggcatggccgacgtgctgctcaatggcctgggctacgacagcaaacagaccagcgcggtgcagcagatcatcttcgccggcatccgcgacaagcgcctggacatcttcctcggctactggaaacccgcgatggacaacaacatcgcgccgttcctggcggccaggcaggtcaaggtcttcgacaccccgagcctcgccgacgcgcaggccaccctggccgtgccgcaatatgtggccgacgcgggcttgaagacctttgccgacatcgcccgcttcaaggacaagctcggcggcaagatctatggcatcgagccgggcagcggcgcgaacaccgatatccagaaaatgatcgacaccaaccgcttcggcctgggtggcttcaagctggtggcctcgggtgaggcgggcatgctcgccgccgtgcagcgcgcggtgaatcgcaaggagttcgtggtgttcgtcggttggaccccgcacccgatgaacatcaacatgaaaatggcctacctcaccggcagcgaagacgtgttcggccccgacgaaggccgtgccaccgtgtccaccgtcaccgcgccagacttcgccgagcgctgccccaacgccaaccgcctgttggaaaacctcaccttcaccgccgcccaggaaagccagttgatggtaccgatcatggagcgccagtcgccgcaggaggtggccaggcaatggttgcgtgatcatcccgaggatttgcagcgctggttggctggggtaaaggcatttgatggcggcgatggtgtagcggcggtgcaggcgagccttaaatgagtcgatacccgatctcgccggaactggcggcgtttgtggagaagacggagtccttcacgagcgacgacgcgtcgctggctgggttgcgccacagctacgaccgcatgtgccaggcgtttaccccgccggtgcccgacgggctggcgatgacggatttttccctggctggcgtgagtgtgcgcagttatctgcccgctgcccccgcgcccttggctggctggccgtgccttctttatatgcacggcggtggttgggtggtcggcgggctggattcccacgacttcatctgcttcgaattggccacggccttgcaggtgctggtaatcgccattgattaccgcttggcgcccgagcatccgtttccggcggcctatgaggattgccgcgccgtgtggcaggcgatccaggcggggcaggggccgcatgccatcaacctgcaacgcctggtggtgatcggcgacagcgcgggcggcaacctggccgcggcggtgtgcctggggttgcgcgacgaccggcagccactgccgctggcccaggtgctgatttacccggggctgggcggcccacctgaactgccgtcgcggcgcgactgtgcggatgcgcccttgctcagcagcgccgacactgagagttacctggcgctgtacctgcagggcagcggcaagcccacggcgtatgccatgccgctgctggtcgacgacttcagcggtttgcccaaggcattcattgccgtggcccagttcgacccgctgcgtgatgacggcatgctttacgccgagcgcctgcaagcggcgggtgtgagcagcgtgctgtatcccggcaaaggcctggtgcacggttgcctgagggcccggcggcacgtaccggaggtggaccggctctacgatttcctgctggattacctggggagcgaagggctgacacaggtctaagcgctctaggacatgctcattgcacaattcgggtttatagtgccagacggcaaaataaaagacgtccccccagggatgaacccgaccccttacggagcgcgcaatgcagacttggtacccgcagatcaaaccctacgcccggcacgatctggcagtcgatgacatccacacgctgtacgtcgatgaaagtggctcccccgaaggcttgcccgtcgtattcatccatggtggccctggttccggttgtgatgcgcagagccgctgctacttcgatcccaacctgtaccgcatcgtcacctttgaccagcgcggctgcgggcgctccaccccgcgcgccagcctggaaaacaacaccacctgggacctggtcgccgaccttgagcgcatccgcgagcacctgggcatcgaaaaatgggtattgttcggcggttcctggggctcgaccctgtccctggcctacgcgcaaacccacccggagcacgtgcatggcctgatcgtgcgcggcatcttcctggcccgcccgcaggacattcattggttctaccaggagggcgcgagccgcctgttcccggattactggcaggactacatcgcgccgatcccggtggaagagcgccacgacatgatcgcggcctaccacaagcgcctcaccggcaacgaccagatcgcccagatgcacgcggccaaggcctggtccggttgggaagggcgcatgttgggcctgtgcccgagcccggcgcacgtggagcgtttttccgagccgcaacgcgccctgtccatcgcgcggatcgagtgccactacttcaccaacaactcgttcctggagccgaaccagctgatccgcgatatgcacaagatcgcccatctgcctggcgtaatcatccatgggcgctacgatatgatctgccctttggataacgcctgggagttgcaccaggcgtggcccaacagtgagctgcaggtgattcgcgaagccggccatgcggcgtccgaacccggcatcaccgatgccttggtacgtgcgaccagcgaaatggcacggcgcttgctcgatctgccgcctgaagaagcatgaagggcctgttgcaacgggtgcgcggcgcccgggtcgaggtcgcgggcgaaatcgtcggcgccatcgaccagggtttgctggtgctggtggccgtcgagcctgcggatacgccggaaagtgccgataagctgctgcacaagctgctgaactaccgggtgttcagcgatgccgaaggcaagatgaacctgtcgttgaaggatatcgacggcggtttgttgctggtgtcgcagttcaccctggcggcggataccaagagcgggctgcggccgagcttctccacagcggcgccgccggccctgggagcggcgctttttgatcacttgctgttacaagcgcaacaattgcatggcaaggtggcgtcggggcgttttggcgcggatatgcaggtgcatttggtcaatgatggccctgtgaccttcctcttgcagacgtgaatgtattaaaaacgacttttaatgcctaaaaacgcagggtttcgctacaaatacttcgttgtccctgatgcgttgtctcgcgggctactagataatcgcgcgctacggggatcagcgttgtttggtccatttttgacttaggtagagacttgtccgatcgccaatggggaatcattttgccccaggggagtcggaacaatgctcgccaacctggcatatagatagctggccgttggttttttgatctgttttcggcgagggttgctcgtgattgttagtccctgtaatgcaccaaaattgtctgccaaacggttacgaaacgcactggtgacgggctccgccctgttttgcctgttcggcgcgggtcaactgtgggcattcagtctggatgatgtgtcggccaaggcaaaagagctggccgggcagaaatacgaagctccgcgcagcaatctgccgaacgaattccgcgaaatgaaattcgcggactaccagaagattcgtttccgcaacgaaaaagccgagtgggccgatcagaacaccccgttcaagctgtccttctatcaccagggtatgcacttcgatacaccggtgaaaatcaacgaagtcaccgccgacagcgtccaggaaatcaagtacgacccgacacgcttcgatttcggcgacgtgaagtttgatcccaaagccaccgaacagctgggttatgccggcttccgtgtgctgtacccgatcaacaaggccgacaagcaagacgaaatcatgaccatgctgggcgcgagctacttccgcgtggtcggcaagggccaggcctatggcttgtccgcccgtggcatggcaatcgacacagcactgccgtccggcgaagaattcccgcgtttcaccgagttctggatcgagcgtccaaagccgggtgagaaacaactggtgatctttgccctgctggactcgccgcgcgctaccggtgcttaccggctgatcctgcgtccgggcaccgacaccattgtcgacgtgaaatcccagatgttcctgcgcgacaaggtcagcaaactgggtgttgccccgttgaccagcatgtacctgttcggcgccaaccagccgtccaaagtgctcaactaccgccgtgagctgcacgattccagcggcctgtcgatccatgccggcaacggcgagtggatctggcgcccgctgaacaacccgaaacatctgtcggtcagcaacttcaccgtcgagaacccgcgtggtttcggcctgctgcaacgcggccgcgacttcagccactacgaagacctggacgacaactacgacaagcgcccaagcgcctggatcgagcctgaaggcgactggggcaagggcaccgtcaacctggtagagattccgaccgccgatgaaaccaacgacaacatcgttgcgttctggagcccggaaaaactgccggatgtgggccagccgctggacgtttcctaccgcctgcactggaccatggacgaaaaatccctgcacccggccgacagcgcctgggtcaagcagaccctgcgttccaccggtgacgtgaagcaatccaacctgatccgccagcctgacggcagcgtggcctacctggtggacttcgagggcccgtccctcaaggccctgccatcggatgccgcggtacgcagccaggtgagtgtcagcgacaacgccgaactggttgaaaacagcgtgcgctacaacgagcacaccaaaggctggcgcctgaccctgcgcatgaagatcaaggacgcaggcaagccaaccgaaatgcgtgcggcgctggtgcaggacgttccgcctccggcccctgagcaggacacgagccatgtgctcaaggccgacaaggtcctggccaagcaacacgagaaacaggccaagaaagacgcaaaagacaaggaagccaagcagccagaagctgccccagccacgccggagccgatcaagaccgaacaagtcctgaccgaaacctggagctatcagttgcctgccgatgagtaattctcaaatccagccggagactctgtcagagtacctggcgcatctgccgatgaccgctgagcagcgcgccgaactggcgggttgctcatccttcagcgagttgcacgagcgtttgtcgtcgaagaccttcgacgcgcccattgacgccgcccaggcgtcggttggcacgcggttgaccctcagcaccgccgaagagctgcaggacgccgaaatgctggccctcgacgccgagggccgcgtgtgcctcaaggctacgccgccgatccgtcgcactcgtgtggtcccggagccgtggcgcaccaatatcctggtgcgcggctggcgccggatcaccgggcgcagcaacccgccggccccgccgaaagatgagcgcgtattgccggctgcccgctggcgtaccgtcggttcgatccgccgctacatcctgctggtgctgatgatcggccagaccctcgtggccggctggtacatgaaaggcatcatgccgtaccagggctggtcgctggtcgacttcgacgagatccgcaaccagaccctgctgcaaaccgcgacccaggtactgccctacgccctgcaaaccagcatcctgatcatgttcgggatcttgttctgctgggtatcggccggtttctggaccgcgttgatgggcttcctggagttgctcaccggtcacgataaataccgcatctccggtaaaagcgccggcgacgagccgatcccgaaagacgcccgcaccgcgctggtgatgccgatctgcaacgaagacgtgccccgggtgtttgccggtttgcgtgcgacgttcgagtcggtcgccgctaccggtgacctggatcgcttcgacttcttcgtgctcagcgacagtaacgaggccgacatctgcatcgccgaacagcaagcctggcttgacgtgtgccgcgaagccggtggtttcggcaagatcttctatcgccgtcgtcgccgtcgcgtgaagcgtaagagcggcaacctcgacgacttctgccgtcgctggggcggtgactataaatacatggtcgtactcgacgccgacagcgtgatgagcggcgaatgcctgaccagcctggtgcgcctgatggaagccacgccggatgcggggattatccagaccgcgccgcgtgcgtcgggcatggacaccctgtatgcgcgcatgcagcagttcgctactcgtgtgtacggcccgctgttcaccgccggcctgcatttctggcagctgggtgaatcccactactggggtcacaacgcgatcatccgcatgaaaccgttcatcgagcattgcgccctggcgccgttgccgggcaagggcgcgttcgccggttccatcctgtcccacgacttcgttgaagccgcgctgatgcgccgtgccggctggggcgtgtggatcgcctacgacctgccgggcagctatgaagagctgccgccgaacctgctggatgaactcaagcgtgaccgtcgctggtgccacggtaacctgatgaacttccgcctgttcctggtcaaaggcatgcacccggtgcaccgtgcggtgttcctgacgggtgtgatgtcctacctgtcggcaccgttgtggttcctgttcctggtgctgtccacggccctgctggcggtgaacaccctgatggaaccgcagtacttcatggcaccccgccagttgtacccgctgtggccgcaatggcatccggacaaggcggtggcgctgttctccaccaccatcgtgctgctgttcctgccgaaactgctgagcatcatcctgatctgggccaagggcgccaaagagttcggtggcaagttcaaggtgaccttgtcgatgctgctggagatgctgttctccatgctgctggcgccggtgcggatgatcttccacacccgcttcgtcctcgccgcgttcctcggctgggccgcgacctggaactcaccgcagcgtgacgacgactccaccccgtggagcgaggccgtcaagcgccacggtccgcaaaccgtgctgggcttcctgtgggcgctgttggtggtgtggttgaacccgagcttcctgtggtggctggtgccgatcgtcggttcgttgatgctgtcgatcccggtgtcggtgatttccagccgtgtcgggctgggtctcaaatcccgcgacgagagcctgttcctgatccctgaggaatacaatccgccgcaagcgctgctgtctaccgacaagtacacccacgaaaaccgttggcacgcgctgaatgacggctttgtgcgttcggtggtcgacccgcagcagaacgctttggcttgcgccctggcaacctcgcgtcacgcccaggccgaaccgatcgagtacctgcgtaccgaacgtgtgcgccacgcgctgaaagtcggccctgccggcctcagcaacggcgaacgcctggccctgctcagtgacccggtcgccctggcgcgcctgcacgagcaggtctggagcgaaggtcatgccgagtggctcgccgcctggcgggactcgatcaaggcagatccgcatgcaccgttgctgccgctgcaaccgctgtcgtcccaggcccaaccggcctgattcaggcacccccgagggctcgcctcgggggtgttcgcagcgctggtcctacagcgtttcccgcgttttctctgttgtgccaacaccttgttatttcgaaacaaaagaccctcgcttgaggcgtattgccgtgcccgtggctgcgttagcatcgcccccgcatttgacttggcacggggggattcatgatcaaacggtatgttttggcgctgctcataggcgctgtcgctttcattcacatgggcctggcccaggccggcgcgattgatgacgccgttcggcgcggcgtgctgaaagtcggcaccacacccacttacgtgcccttcgaaatgaccgataaacaggggcgcatcgtcgggtttgaaatcgacctgctcaaggtcatgagccaagccctcggggtcgaacttgagttggtcgtggtgccctacaccgaactggtggcggggctcttggcgaagaagttcgacctgatcggcagcggcatgaccgtcacccaggaacgcaacctcaagctgaatttcagcgattcgttcatcgtcgttggccagtcggtgttgttgcacccaagccttgcgggcaaggtcaccagtgtcgaagacctcgatgatcccggctaccgaattgccgccaccgaaggcaccaccggcgagtcagcggctcgacgttttctgggggcagcgcgactcagcagttttgccacgccggaggaaggcgtacgccaggtggtgcagggcaaggctgacgcctttattcatgatgccccctacaacctgatcgccctgaaccgcccggaaaacagcaccctgttggcactggaacaacccttcaccttcgaacccctggcgttcggcttgaaaaaaggtgatttcgacagcctcaactggatcaaccatttcctcaatcaggtggcgcaggacgggacctatgatcgcttgcacgacaagtggtttaaagacaccgactggctggtggaaatcgactgaaagtcataactgcttacacatcaagccgttgcccgagctgcctgagcaagtgtctacccctgcggtttgctgcagcgttgtggggcttttccgacatacgccgacaacaaatagccgtgaaacctttgtgacggcaggcgagtgggttaggatcgcaccccgaaatggtgcagcccttttgcgcgccgaccttataagaatggttcaggggacttgatgatgaaaaagtatctttcgatgctgctgctcggcgtcaccgcgctggtcgcggccaatgcggcccaggccggtgcgatcgacgatgcagtcaagcgcggcacgctgaaggtcggcatggacccgacctacatgccgttcgaaatgacagacaaacgcggtgaaatcatcggtttcgaagtcgacatcctcaaggccatggccaagtccatgggcgtcaagctggagctggtctccaccggctacgacggcatcatcccggccttcctgaccggcaagttcgacatgatcggcagcggcatgaccctgacccaggaacgcaacctgcgcctgaacttcagcgaaccgttcatcgtggtcggccagaccctgctgattcgcaaggagctggaaggcaccatcaagtcctacaaagacctgaacgacgagaaataccgcctgacttccaagctgggcaccacgggtgaaatggtcgccaagaagctgatctccaaggccaagtaccacggctacgacaacgagcaggaaggcgtgctggacgtggtcaacggcaaggccgatgccttcgtgtatgacgcgccgtacaacgtggttgccgagaagaaagtcggcaacggcaagctggtgttcctggaagaacccttcaccttcgaacccctggcgtttggtttgaagaagggcgactacgacagcatcaacttcatcaacaacttcctgcaccagatccgcaacgacggcacctacgatcgcatccatgacaagtggttcaagagctccgagtggctcaaggacatggaataacgcttcagaccgagttgcctgtatcgcaggcaagccagctcccacatttgacggtgttcacacatcaacatgtgggagggggcttgcccgcgatggcggcctcacaggcaacacaaatcgcggaaagtgaaatgaaacagaaaaaagcccaatggccctggcacctgctgaccgtggtcgtgctggtcggcctggccggcgcgttgtactacgccacctcgttgatgtcctacgagtggcgctggaaccgcgtgccgcagtacttcgcttaccaggcggaaacatcccagcgtgccgctgacatctccaccgtggtcgagctggtacgcaaaggcgatgtggccgaagtcaccctgcgcaacgatgcaggcgccgagcaaaagctgaccgtggccgacaacagcctgcaagtggcgcgtggcgacgatgtggccgaaggcgacgtggtgggcgtgacccggcagtgggcgctgggcccgttgatgtggggcttgtggaccacgttgtggttgtcggtggtgtccggcatcctcggtttggcgatcgggctcgcgacgggtttgtgtcgcttgtccagcaacccgaccctgcgggatctgtcgacgatctacgtcgaactggtgcgtggtacaccactgttggtgcagatcttcattttctatttctttatcggcacggtgcttaacctgtcgcgggaatttgccgggatcgccgcgctttcgctgtttaccggtgcctacgtggcggaaatcgtccgcgccggtgtgcagtccatcacccgtggccagaacgaagctgcccgttccctgggcctgagtgccagccagtcgatgcgccacgtggtgttgccgcaggcgttcaagcgtgtgctgccgccgttggccgggcaatttatcagcctggtgaaggacacgtccctggtgtcggtgatcgcgattaccgagctgctcaagagcggtcgtgaagtcatcaccacctcgttctcaccgtttgaaatcctgttctgtgtcgcaggcctgtacctgctgatcaacctgccgctgtcgaaaatggccagccggcttgagcggaggctcgcgcaaagtgattgaagtccgcgatctggtaaaagtcttcgacacccgtggtcatgtggtccgtgcggtggaccacgtcaccacgcaggtggccaagggcgaagtgctggtggtcatcggcccgtccggctccggcaagtccaccttcctgcgttgccttaacggcctggaggaattcgactccggctcggtgagcatcgacggcctgcaactggctgacccgaagaccgatgtgaacgcctaccgccgcgaagtcggcatggtgttccagcacttcaacctgttcccccacatgactgtgctggagaacctgtgcctggcgcagaaagtcgtgcgcaagcgcggcaagcaggagcgtgaggccaaagccctggcgctgctggaaaaggttggcatcgcccagaaagccaacgagtttccgtcgcgcctgtctggcgggcagcagcaacgggttgcgattgcccgggccctggcgatggagcccaaggtgatgctgttcgatgaacccacctccgcgctggacccggaaatggtcggcgaagtgctggatgtgatgaagaccttggccctggaaggcatgaccatggtctgcgtcacccacgaaatgggctttgcccgtgaggtggccgatcgcgtgctgttcttcgaccatggcaagttgctcgaagatgccgccccggccgagttctttgatgcaccgaaagacccacgggcccaggcgttcctgcgccaggtcctgtaaggctcagagcctgaatttgccgaccagcgtctgcaaatccaggctcagtttggtcagttggacgctcgccgccgctgtttcctcgctggcggcggcggtctgttccgacacatcccgcaccttcaacacgctgcgattgatctcttcgaccactgcactttgctgttcggccgcggcggcaatctgcgggttcatttcctggatcaccgagaccgtgcgcgcaatcgccgccagggcgtcacctgcgtcgcgggtcagctcgacactgtcgtcggtcaggctgcggctgctgtccatgatgtcggcgacttgctgggtgccggtctgcaacccctggatcagtccttcgatttcttcggccgattcctgggtgcgctgtgcaaggctgcgtacttcatcggccaccaccgcaaagccttcgccggccgtgcccgcgcgtgcggcttcgatggcggcgttcagcgccagcaggttggtctgctgggacaccgatttgatcacatccagcacgctgccgatcttctggctttcttgctgtaacgccagcatcgcccggcccgcgagggccatctcatctgccagttggcttatctgctcaacggcctgggtcaccactttctccccggcgctggcttgcagatcggcttcgttcgccgcgaccgaggcttgctcggcgtgccgggcaacttcctgtgtggtggcgagcatttcgttcatggcggttgccacttgatcggtttcgtctttttggtggttgatgccggtgtgactgtgttcggtaacggccgacagctgtgtggcggcgctggcgacctggcgggcgctgtcgccgatgccgctgatcaggctgcgcaggttgcggttcatgtcactgatagttcgcagcaattgccccaactcatcgcggcgttccacttggatgtcatggctgagatcgccctgggagatgcggttggcagacaccagcacctggcgtagcggcacggcgatctggcgagcgatccaccaggctgcaagggcaccgagcagcagggcagccaccgtgacgctgatgagcagtgtccgggtgttgtcggcttccttgccgcgcttgagaatctggccattgctcaccgcttcgctttgttcaagcaactggttgagctgcgtttcaaaccgcccctgcgcagtttcggtggtgagctgagcgtccttgagcttgatcaactgcgcgcgatagttcgccaggtcggttttaagcaaggttgaatcgatcggcaggtctgtcacggccgcttgggcaatgtccagggcatcgagggcctggccgacggcttcggcataggcttgcagcgactcctccgcccaggcagggcttcgggcgcggtcctcggcttgctccatagcctggcgcaggttctcgatggcatcgagtgcctgctggtcctgctggtcaggcagttcgctggcgagttgtgcgagcgtgtcgctggcctggagtgctgtggcgtggaggggggagcgcaagttctcgcgcgcctggatcaacggcggcagctccaccagcgccgccttgaagctggccgacaggcgttccgcttcctggacgcgctgcaagtcggctgggtctttcagatgggttgacaggaagcggaggtgctcatcgatctgaacgacttgcctcttcattttgtccaggctggccgtgtccgccagggtccggtacacgatacggtccgcacgcatggcttcagcaacaaccgacagttggctcaaggcagtcagattgcctgagcggaacaacaccgcattcagggcttgccagccggccacggcgatggcgaagctgagcatgagcacctggccaaaccccagggcgagcttgaggcggacgctggcattgaccagccaacgggccagtagaggaagcatgatgaacctccaaatctgaaaaagcgtttcgcgacaaaagaaacgctaattcgattcggagtattgctgggctgataactgcgtaggaaatttcacaaggtgctgattagatgcggaagcgccccaccagtgtctgcaggtaaatgcccaggcgtgcgagctcggcactggaggcggcggtttcttcactggccgaagaggtttgttccgacacatcgcgcacgttcaatacgctgcggttgatctcctcagccaccgcactttgctgttctgcggcagtggcaatctgcgagttcatcgcctggatggtcgagaccgtgcgcgtgatgctcgccaacgcgctgccggcgcgacgggtcaactcgacgctgctgtcggtgaggccacggctgttgtccatgatggtcgcgacctgctgggtgccgctttgcaggccgacgatcagttcttcgatctcttcagtggacttctgcgtgcgctgggccaggctgcgcacctcatccgccaccacggcgaaacctcgtccggcttccccggcacgtgcggcctcaatcgcggcgttgagggccagcaggttggtttgttgcgctacggacttgatcacatcaagcacactgccgatcttgtcgctttcgcgcttcaggtcacccatggcgacggtggaattgcccacctcggtggccaggcgttcgatctgggcgatggcttcgcccaccaccttgtcaccctcgcgggcctgctgatcggcggccacggcggcctcagaggcttcctcggcgttacgcgccacttcctgcacggtagccgccatctcgttcatggcggtggcgacctggtcggtctcgaccttctggctgttgacgccggcgctggtttgttcggtcacggccgacagctgctcggcggcgctggcgatctgggtgacgccgtcgctgatcccgccgatcagctcacgcaagccgacggtcatgctttgcatggcgcgttgcaactggcccagttcatcctggcgcaaggaagtgaggttgtggctcaggtcgccggaggctacgcgttctgccacctgcagcgtctggttcagcggaatgatgatctggcgggtgatggcccaggcggccaccagaccgaagatcagcgccagcacggtcgccagcagcaacagttgtttggcccgcgcggcgtcggcgtcgcgtaccacggtttgcgaggtggtgagtttttcgctgtggttctgcagggtctcgccttgggcgctcatgattttcagcgcgtcggcggcggccgtctgggagtcacggtactggctgacggccgcgcggtaggcttgcagtgaagtgctggcctcctgcaggttggcctggtactccgcaggcaattggccctccagcgcggtgattttcttcacggcgttatcaatcgcgtcgagggccggctgctccgcctcgaccttggcactgtaggtgtagccgcgtacctggaagcgtgcctgctggatcagtttgctcaggtcgaccacgctgttgaactgcgtgacgctgtcaccttgcagcagggacttttccacctcattgaccttggccacggcgttgtcggcggtgtcgcccagcttgctgcgcgcgccttcacgcttgagcccggcctggaccatggcgccgaaggcttttttgtattggttcaaggcgtcctgttgttgttccaccagggccttgtcgtcgggttgctcgatcaggtcggcggcggtcttgaggccgctgtccagtttggcgatcaggccgttgaccgcgtccgtgccttgttcgccgcgacgcatttcgaagtccaggcgcgccaggcgcaagtccttggtcagtccgttgaggctggagatatagcccagcttgtcaccgcgactggtgacatcccccaagccggtccaaccggtgaaggtgatcatcaacgtgagcagcaataccaggccgaagcccacgccgagtttggttttgacgctgacattccccagcttttcggctaaccaacgatacatgctgcgaactcccctggaacaaggcttggacttatccagaggatatcggccagcacgcgcaattctgtagcgaagctgtacccatgtgggagggggcttgcccccgattgcagtggttcagcaatggataagctggatgacacaccgctatcgggggcaagccccctcccaccgggttgcttagggaagttagaagagtcgggcgagcagggcggtgacggcggtttcgacgcgcaggatgcgggcgcccagttgcaccggctgcaagccggccttggccagcaggtccacttcgtagggaatccagccaccttccgggccgatggccagggtcaccggctcatccagcccgcgggggcaggctggatagtcgccaggatgaccgaccaggcccagggtgccttcagtcatcgccggcaggcggtcctcgacgaacggcttgaagcgcttctcgataatgatctcgggcagtaccgtatcccgcgcctgttccaggccgaggatcagttgctcgcgaatcgcctcgggttccaggaacggcgtttgccagaagctcttttccacccggtaactgttgaccagcaccaccttgggcacgcccatggccgccacggtctgcagcacccggcgcagcatcttcgggcgcggcagggccagcagcagggtcagcggcagtttggccggcggcggttggtcgaagctcacatgcaactcggcttcactggcctccaggcgcaacagttgggcattgcccatcaagccacccatgcggccgacgcgcaggctgtcgcctacggcggcgcggtggacttcctgcatgtgcaccaggcgccgatcacgcaacactacgcggtcggccgcgatgaaatcggcctcctccagcagcagcaggttcacggctgggtcgctggcggctggtcgtcgtcgcgctggtcatccgggtgttcgccgcgcttgctgatcaggttgctgaacaggatgccgatctcgaacagcatccacatcggcacggccagcagggtctgggagaagatgtccggcggcgtgaggatcatgccgaccacgaagcagccgatgatcacgtacgggcggatcttcttcaggtacgccacgttgaccacgccgatccataccagcagcaccacggccaccgggatttcgaaggccacgccaaaggcgaagaacagcgtcatcacgaagtcgaggtagctggtgatgtcggtcatcatttccacaccggccggggtggcggcggcgaagaacttgaagatcagcgggaacaccaggaagtaggcgaacgccatgccggtgtagaacagcaggatgctcgacaccagcaacggcaccgcgatgcgtttctcgtgcttgtacaggcccggcgcgatgaagccccagatctggtgcaggattaccgggatcgccaggaacagcgaaaccatcatggtcagcttcagcggcgtgaggaacggcgacgacacgtcggtggcgatcatcgtcgcgccggccggcaggtactggcgcagcggcgtggagacgaaggtgtagatctgctgggtaaaggcgaacagcccggcaaagatgatgaagatggccgctacgcagcgcagcaggcgggtacgcagctcggtgaggtgcgagaccagcggcatatgctggtcgttttccggtttatcagcgctcatggggctcgcggcggcaatgtagggtcatggggcgcgggcgacgcggcaggcgtcggcgcaggctcggttggggcggtcggtgcgacgggggcggcttcaacggtcggcgcgatgctgttttcagccgcaggctccaccggtttggctggctcctgcacgggcgccagaatcttgcgggcttcctgctccaacgagaggatgtgctcgttgtgcagttgccggcggatctcgtcggcgccgatttcccgttcaacttcctgtttgatcgcattgaaactgcgtttcaggcgcccgatccacaggccggccgtgcgcgcggcaccgggcaggcgttccggccccagtaccagcagggccacgaggccgacgagcagcagttcagagaagctgataccaaacattagtcagtgctcacgagtctttgcgggtcggctcttcgactttctcagcctgtacgtcgaaggtacgacgctcagtgattggctgggtagcctgcgggtgcacaggctgcgccggaggcacggggttgacggcagggtcggccggcttttcgtcgtcgttcatggctttacggaagcccttgatcgactcgcccacatcggtgcccaggttcttgagtttcttggtgccgaataccagtaccacgaccaccagaatgacgatccagtgtttccagtcaaaaatgcccatgctgcgtatcctctagtcttggttattcaggcggacgggcgcgaggccttctcggcgtgcccggacaagccgaagcgacggtccagttcatccagcacagcctgtgggtgctgccccagttgggcgagcatgaccaggctatggaaccacaggtcggcggtctcgtagatgacatcgctgtaatcgccgctgagctgcgcgtccttggcggcgatgatggtctcgatggactcttcgccgagtttttccagaatcttgttcaggcccttgtggtacaggctggcgacataggagctgtcggcgtccgcgcctttgcggtcttccagcacctgggccacgcggttcagggtatcgctcatgtctagtgtcctgccgagtagatggcgtgcgggtctttgagcaccggctccacgactttccattcgccgttctcgaacacgcgatagaagcagctgtgacggccggtgtggcaggctatgtcgccgatctgctcgaccatcaggatcaccacgtcggcgtcgcagtcgatgcgcatctcgtgcagggtctgcacgtgcccggactcttcgcccttgcgccacagtttgccacgcgagcgtgaccagtagatggcgcgctgctcagtggcggtgaggctcagggcctcgcggttcatccaggccatcatcagcacgcgcccggtcttgtagtcctgggcaatggccggcaccaggccgtcactgtcccacttgatctcgtccagccagtctttcatgttcggctccggcaatttgcgacagtgtataaccggattggctatcgacgcacgatcagataaacacccacggcgaccatgatgccggccggccagtggcccagttggttcagcgggccaccgatggccagcatcacgccgccgaccaggtgtgcggcgcccagcaggcgcaggaaccagtcatccttgcgcttgtgccacggcggcgccgggtccttggcatggggctgggacatgcgctccaacaggtcgcgggtcatgttggccaggtgcggcagttgttccatctggctgtgcaggttgcccagcacggttttcgggctcatccgctcgcgcatccagcgttcgaggaacggttgcgcggtgttccacaggtcgaggtccgggtacagctggcggcccaggccttcgatgttcagcagggttttttgcagcagtaccagctgcggctgcacttccatattgaagcgccgcgcggtctggaacaggcgcatcagcacctggccgaaggaaatatcttttaacggtttttcgaagatcggttcgcacaccgtacggatcgccgcttcgaattcgttgagcttggtttccgctggcacccaacctgagtcgatatgcagttgcgccacgcggcggtagtcgcgcttgaagaaggcgaacaggttgcgcgccaggtaatcctggtcttccggggtcaggctgccgacgatgccgcagtcgatcgcaatgtactgcgggctccacgggttgacggtgctgacgaagatgttgccggggtgcatgtcggcgtggaagaaactgtcgcggaacacctgggtgaagaagatctccacgccacgctcggcgagcatcttcatgtcggtgcgctggtcggccagggtggcgaggtcggtgacctgcacgccgtagatgcgctccatcaccagcactttggggcggcaccagtcccaatacacttgcggcacgtacagcagcggcgagccttcgaagttgcgcttgagctggctggcgttggccgcctcgcgcagcaggtcgagttcgtcgtagatggttttttcgtagtcggcgaccacatccaccgggtgcagcaggcgtgcatcggcgctgaagcgttcggcagcgcgggcgaggatgaacagccacgccaggtcttggccgatgatcggcttgaggcctgggcgtatcactttcaccaccacttcttcgccggtcttgagctgcgccgcgtgcacctgagcgaccgaggccgaggccagcgggtcgacgtcgaagcggctgaacacgtcgctgatcttcttgcccagttgctcttcgatgagcttcatcgattgctgagagtcgaacggcggcacgcggtcctgcaacagcatcagctcgtcggcgatgtcttcgggcagcaggtcgcggcgcgtcgagaggatctgcccgaacttgatgaagatcggccccaggtcctgcaaggccaggcgcaggcgcgcgcctctgctgagttccagctgtttgcgtgggaaccagcgccacggcagcacatagcgcacggcgagcaggaaccacggcaggggcagggcgaacagcaggtcatcgaggcggtagcggattacgacgcgctggatacgaaacaaacggcggacggcgagcagcttcatgcgttatcgcttggatcaagggaacggctcaggcgctcgaagcgcgcctcaaggcgttccaggtcgattttggccttgtcgagttcacgaaagcgcgcttgcgcttcccgctccccgaccagggtgcgcgattcttcgctcaggtattcggcgaggttctggttgaggctggcgaacccttgctggtaccagcgcgaacggctgcgcaggtgcccgctgatcaactgggtggcgacggggccgatccagcgcgacagttcgtattcccagtccagttccaggtcctgcagcacggcggcgaggtccatcagcaccgaactgtcgccttccaactccacttcggcgctgtgcaggatggcggtcttgttgcggctcagggccaggtgcaacaggctcgatgccggcgcacgcagggtgcagtcggattcggcggcccattgggtcgcgagcatcaggccttcttcgctgggcaggataaacagctgcaaggtggggctgcggcaatcgacggcaatcactttgccgttgaggtgcgcaagccgcgccagggcggtgctgtccaggcgcagtacacggttgaggccgtgttctgcgctggcgagaagacctttgatcagcatcagggcttgataccgcggtgcagggcgacgatgcccgacgtcatgttgtggtaggtcacgcggtcgaaaccggcctctaccatcatcgacttcagggtttcctggtcggggtgcatgcggatcgattcggccaggtagcgatagctctcggcgtcattggtgatcagcttgcccatcaacggcatgaaggcaaacgagtaggtgtcgtagaccttggacatcagcgcgttggtcggcttggagaactccagcaccaacaggcggccacccggcttgagcacgcgcagcatggagcggatcgcgtcttccttgtgggtgacgttacgcaggccaaaggcgatggtcacgcaatcgaaatggttgtccgggaacggcagcttctcggcatccgcctggacgaactcgatattgccggccacgcctttgtccagcaggcgatcacgaccgaccttgagcatcgaaccattgatgtcggccagcacgacctggccggttgggccaacgagcttggagaacttggctgccaaatcgcctgtgccgccggcgatgtccagcacgcggttgccggtgcgcacgcccgacaactcgatggtgaagcgcttccacaggcggtgcatgccgcctgacagcacgtcgttcatcaggtcgtacttggccgcgacggagtggaacacctcggcgactttttccgccttttggctttccgggacgttcttgaagccgaagtgagtggtgggttcggcatcgctgcctttgcgctgatcagtcatatcgctgtcaccaaaagagaatgcgggacatgataatccccaaggcctgctttgtcttggcaaggctgaaggtaagatgggcggtcagcgagaccttttgccgcatcgaaggtatccaagtccctataaagaggagtcattgcaatggcccgtataactgttgagcgtgcacattccctgggtaaagagggcgcgcgggcaaaggccgacaagttggcgcacaaactcaaggagcaatacggcctggagccgtcgtggtccggcgataccttgaacctcaagcgttcgggggttaaaggcacagtggtagtggccgaagattcgctgcgtattgatgtggagctgggtctgttgatgtcagccatgagtggcaccatcaagtctgaaatcgaaaaggcgttggacaaggcgttggcgtgatcccattgttcttagggtgccgattctaattttcccgcctactttgtgcccaagccctcaactcctgtgggccgttcctcccccctattctgcgtgaggtgcaccatggccaaagttatcctgaagaaaaaaatcgacgcccagaccaccaccctgagcgaggttaagtcctacgcccgcaagatttggttggccggtctgggtgcttacgccaaagtcggaagcgagggcggcgagtacttcaaagagctggttaaaaccggtcaacatgttgaaagcaaaggcaaaaaagttgcagttgaacaacttgaagccgccaacagtcagattgaccaagtaaagagtaatgtctccacggtcaaaggtctggtagaagttcagctggataaagttgaaaaagcttttgatactcgcgttgccagtgccttgaatcgaatcggcattgcgtctaaacatgacgttgagacactctctgctaagctcgaagagctgacgacattgctagaacgtgtcgcgcgtaaacactaaggagacatcgggatggctgttaaaaagactactcagaaagaaggcagctcgtgggtcggggaagttgaaaaatattcccgtaagatctggcttgctggtttaggcgtgtactcgaaggttagcactgacggcggtaaatacttcgagactttggtcaaggacggcgagaaagccgagaagttgaccaaaaccacggttggaaaaaaagttgaagcggccaaggcaactgccggctccgccaaatccagcattgctgacacttgggagaagttggaacagactttcgacaagcgtctcgccagtgctgtttcgcgactgggcgtgccgagcaaggctgaactgaaaacgctgcacagcaaggtcgataccctgaccaagcaaattgaaaaactcaccggcgctaaagtggctcccgtgaaagcggccgctgcaaaaccggctgccaagccggcggctaaaactgctgcggccaaacccgctgcgaaacctgcggccaagcctctggtaaaagccgccgccaagcctgcggctaaagctgctgccaagccagccgccaagaccgcagccgcaaaaccggccgctaaaccagtggccgccaaggctgctgccaagccggccgctaaacctgctgcaaaaccagcggccaaagccgcggcaaaaccggctgccaaaccagccgctaaaaccgcagccgccaagcctgctgccaagccggcagccgcgaaaccagccgccaagccagcagttgcaaaacctgcggcgaaacccgctgccaagcctgcggcaaaacccgccgccgccaagaagccagcggccgcgaagaaacccgccgccgccaagcctgcaacagcgccagtcgcttcgacagccaactcggtgtccgcgccaacgccagcacctgctaccccgactgcaacgccggcaacaccgacgccatccagtcagtcctgattttccggggcacacaaaaatgcccggcctgcgaaggtcgggcatttttttgcctgagtctcagagcgtcagttgtaggtgatcgacacggtcacgttggtgaccagcgtcccttgagtgacatccgcagcggtgtggctgacagcgtagtagcccgacagtggcagcacggctttccggttgctggttggcaccgtacgggtacgttgggcgggggttccgttggccgggatggtcaccgcggaaggcgtgcgatgcaccagccataagcccgtgcccttggatgtgcctgtgttggcaaacaacccggcgtttccacccgaaggggtgcctgtgaacaggaagtgcacgttgcggatatcggactcacagtcggcggtaacgtcaaactgccgttcgccggtgtaggtgatgttgtcaaagtctgaaatcttgatggtcggcaatacgatgctgcggctcacatcgccagccgccaggttgcacgtaccggcattgacctggccggtgaatctcagtgttccggtggtcgcggcctgcaccgcatgagtggccaggcttgcagtgattgccagcaggagaggcagggtttggatcttcatcaggtggtcctttgggggtcagttgtaggtgatgttgacggtggtggtgctggcgagcgtgccttggcgaaccgtgccgtttttgtagtaggccgcgcccagcggcaagaccgcacgattgcccgagacggcgaccgtgcgtgtggcgttgttgctgatggtctggttggccccactggtgcgcgagtacagccacagggcgataccgccagcagtgccggtattgctgaagagcgaggtgttcccgggggcgggagttccggtaaagcggaaggtgacgctggatgcattgctgcaagtggccgacagctcgaagttgctcgcacctgcgctgttagcgttgttgaacgcgctcacccgcacggtaggcagtgggatggtgcggttgacgtcgcctgtcgccaggtcgcaggtggcggccggcctgacgaaacgtacggcgctgcccagttgcaagcggaacgtgtttgaggatttaagccatttctgttcgaagaaggaacctgggggcactgtcccgctggtgacgggaccgatcttgtagaaggtcgcttctgccgaggtgaagcttgagaccggtccggtaatattgacccggggggtgttatgaagcgtaaaaattgcgttgagtccgctatttgttgtcatcctgacggccacgccaacgcctggaacttcggttgggtgcaggccctggttatgattattggggtagcgcccgttgatccactgggttgccagtacgcagaacgtgttccagccgggagccgcaccgttgaatgcctggcgaatgatcacaccgttgacgggcaggctgtcaggtacagggatagtcgccggcagattgagggttagtgtgtcgttctgatacttggggcaacttgcttgggcggcgattggcatcccgatccccagcattagcgaaacaagttttattgttggtttcattttcctcggtttccccatgacagagaggcccgctctactcggaggcggtggcggcctgcctgcgtgctcagttgtaagtgatgttgacggtggtggtagtggcgagcgtgccttggcgaaccgtgccgtttttgtgataggccgcgcccagcggcaagactgcacgattgccggagacggcgaccgtacgcgtaccgttgttactgatggtctggttcgcgccactggtgcgcgagtacagccacagggccacaccgccggcggtgccggtgttgctgaagagcgaggcgttcccgggggcaggagcgcccgtaaagcggaacgtgacgctggacgcgttgctgcacgtggccgtcagctcgaaattgctcgcgcctgcgctatcggcattgtcgaacgcgctcactcgcacggtcggcaaagggatagtgcggttgacgtcgcctgcagccaggtcgcaggtggaggccgggttcacaaagcggatggagttgttcagcaccatccggtaatggcccttgccgccatcccaattgttgtgctggatctcgccgctgggcagggtgccggtggtgaccgggcccaacttgtagaactccgccaccaaccttgtcgccccccagaggattcgcccaggcgccgatacgaggctttccgtcttgagtttcgcggagtagggcgcaccggaagtcagcgtgaccatgacgcgcatgccgataccgggaacgttggtgtgataaatcagcccgcccggcgccgattgggctgacgtaaatcgcccggtgagaaacgtcggtgtcgcggtggggcaccacatatagaacgtcggatacggccctgcgaacgtctggctggtgatcagttggcctacgccaaggttttccgggacggagatggtgttggggaaggtcacgctgtgttgcatgttggggtaccgatcacacgccgcgtgggcggcaatcggcatgcccagggccagcagtatcgaaatgaatgtgatggagtgtttcatcttcagtcccgtcatgagaaagggtgtttaagggcgaggagcgacgcgcccctcaccctcgatcaaccgcctgtaccggcccggcaggtgccagcgtccagttggcgcaggcgcttgccaccctcggccccaggctccttgtccaggcggtagttcagttggcaggtggcattggcattagggccccacctgacgttcaacgccccttgatcatgtgcaacccgcacaaaggctttgccgccctggccgaccacgccgacgctggcgccgctttcatcaaacacatccgaaccgaacggcagcaggctgccatcctcacgccgtgcggtaatcaggatcgcctggccgctgacggtctcgaactgcagcttcaccaccgaacctgcacgaggcgcgacgttttgtgcggccgtcttgagctcgacatcgacggacaggtccttggggtccagttcgacgacgttctggcggtatggcgtgaggtggggcaccacggcgtaaccgctcgtaccgacctgggcgctgtggttgccgttgatgcgtgcgccctgtgcatcgggggcctggaccaggccaatggtgtcgcccagttccggggcgaaggtcacgccgcctgcgtgggcgaccacaccgccggtcatgccgagggacgctgtacggtaggtgttgctttgcccataactggcggacagcacgccctgactggcttggtacttgatgtcggcactggcggaactgccaccgccctgggtatggctgccacccacgccgtaggtgaattcgttgcggtcgcccaggctgccaccgaggttggcgcgctcgccgctgcttcgattgccgcgatacgccgtggtggtcagggttggcgagcgagggctgctgcccagcgggaagctcaggctcagctcgatttgcttgtcgacgcggtcactcagcaagtctttggtgcgctgggcgctgagggtgtagtgcaggccgttccagctgccggtgtagcccgtggtgaaggtcaggttgccgcttctgcggttccagtagttctgtgaggaaccggtcaggtacaccgagccgttgcccaggctctggttgaggctgatgtccatccggtcgcgcaggcgtgaaacgttgtccaggctacgatcgtcgatggcaaggtcgcgcacccgtgcggcgtcggccacgctcaggaagccctccgtggagtaacggtaggcgccgagggcaaagtgggtgccggtgtcggtaaagttcttgctatagcgcaactgcacgcttcgcccgccacgggagtcgtggcccggaagcttcgcggaggagttggtcaggtcaagcgacagcgcgccgaaaggcgtgttgaaagccgcccccagcaactgcgattgatagtcttcgcccatcaccacgccggtgtagccggtcagcaggttgctgaggccgtgctggtaagtggcttgcatcaaggtcggcgggtagcgcagcccgatttcatccagcttgccgacactcaacgagtagcggctgtagccggcgcgcaacaggttggcgttggcggcaaagggcacaatgaactcacgcttgcggccatcggcctcggtaatcgtgacggtcaggtcaccgccatagcccgtggcaaacaggtcgttgagcacaaacgggccgggagccacggacacttcatcgagcagcacaccgcgctggcgcacggtgacccgcgcgttggtttcggcgatgccacgtacgaccggtgcgaagccagtcatagagtcaggcagcatccggtcgtcactgaacaggctggcgccccgtaagcgtacgctgtcaaacagctcgcccgaggtaaagatctcacccgccaccaattgagagcgcagcggggccagttcgcgctgcacgtaggtgctgctgctttgatagccggcactgctatcgttgcggctgaaactgccgttgtgtcgccagtgccattcacccaggttgaggccggtgttcaagcccaggtagtgggaatcgatggtgcggccattggtctgtgtcgcgaaggagttgacgttgtagcgcacaaaggcggcatcgatgccgctgtcccagtgcttggggtcgacataaccccttgcctggcgcagcagatagatctgcggcacctgcagttccaggcggttctcgcccgagtcgaactggctgctgctgccgggcaggtaggtggcgatgtcatcgcaacgggaaaactccggcgccgacggctggccggcttcggcgggttgattcttcggcgcgtccaggtcgatgccaaagcggacaagcgcgtcgcgctcaaggcacatctgcgcggagtcctggccttcaacggcgacgaagaccagggtttcacgcccgatccactggccgttgaggtagacatcggtgcggtaagtaccgggcagcacgatgttgccgcggctgaattttgaaatatcgacctgctggtcgaccgcccgatccggaaagaaggcggggttgaactcgacattctcggcaccgtaggcggccatggcattggcgctactgagcagcaacaggcagcgcgccatgagcatcgattgacgacgtgacagggatccggcgcttacgctggcaggcgtgttggaactcatgtttaccattctcaaaaataaggactgtccgaattcgggcaaagggaacccctgcccaaaaaaagaggcatcaaccgaatgtgtgtaacgaagtggatagcgttgccagcggctggacggatgtcgccgctggcgtattcaggccgtcatttggcgagcttggcgcggtgggggatggttaccccaaagtcgtcgagcgtctggaactccacggtttgcgaggggctcggcggtgacttgaggctgggcagctcaaagcggttgcgtcctcccggcaccaccatgttgtccgtgccggacgccactgccttgcgggcatggcgttgctgtgcctccagcacatcgacctggtcgaacgtcacgtgatacggggtggggttatagacttcgaggacctggccctgctcggtggattcgcgccgccactgcagtttgcctggcgcctcctccacgctataaggcaaattcggcggacggaaaaacagcttgatccgcgagcgaaaagccagctgcaactgattattctgcggggaaccttgcgcctgggaaggcacctccagcacgttgaaccagaacaggctttcctgtttcgacggcagggcttcccccgtatacgccaggcgcacgacctgctgtttgccgggctccatgcggaagatcggcggtgtggtcacgaagggtacgcccgccagatccggcgtcgagtactcgtcgccattgtccagccaggcctggatcagcaccggcgcctgattcttgctttcaagccgaaccgtgacttctttgtcgttctgcgggtagacaatgcgggtgttgccgatgacaacactcgcgtgtgcgacggcagtgccgaacagcgcgaaggcgactgcgatgaacctgggcaggtgtgtgagagacattacgttcatggcggtgctcatctcacggctgaagggctaaggctcgccgagtggcgaacgcgggcgccgaagtcgctgacgctggtgaattcgactttgggcgtgccgctggggcgatcgcgcaactgcggcagcgcaaacagtttcacatcgccggacggcatcaacagaccgtcattggggtcttggttcgcggctttgctgaaccgtttgccttggctcagcaggtcaaccgatgtcagcgaaatatggtaaggcgtcgggttggtcgcttgcagtgcgtagccgttattgtgaggtaccagctgccattgcagtttcgaaggggcgctggccaccgggtagggcaacgattgagggcgcaggaacacacgcaagcgggtccgaaacgccaactcgatctgattgttctgctcggcgcccgctgtcaccggtggcacctccaacacgttcagccagtacaggctttcccggtcggtgggggcgggctcgccggagtagcgcaagcgcaatgcctgctgttgatgaggctcaatgcgaaagatcggtggtgacaacgtaaacggtgtttgcgccgtcgcgggtgttgagcggatgtcacccgtatccagccaggcttgcaccagtgcgggtcggtcccctctattctccagccgcacgacgacctcttgatgttcggccgggaagatcacgcgggtcccatagataatcacccctgcatgggccggcatcgctttgagcgacagcaacccaacggcacaggtggcaagcgcaaggcgagccatttttttcatagtgtcgcaactcttcgaatcggggggatggacctgcctgactgcggcaggcccgtttcatgcgaggcctgctggcgcaggcccattggtcccttaatcggcgtacacgaccatgaagccaacgcgagtcttgaccgtgccctctgtggcgggagcggtggcgtacatttgcgcggccagtggaatcactgcctggttgtcggcgatcaccacgccttccgatttctcggtgtacacgtggattggcgtgccatcgcggttggtcacttcaacctggacgttcttggcgttggcggtgtcgtccgggtcatcgtagccatcgatgttcaagcggccggtcgccacgtcaatggcggggctggtagggtcgaacgcaaccatggcggtgcgaccgttggtgcaactgccttcacctggcgcaccaatgcgaatggtgaaaccggtcaggttggcgcgatcacccggcctggccaggcgtgctgccgaaacgccacccaggttgacgtccttgaccactgccccggtgcccggtgccgaaccttcaaccgtgcaggtcacatcgttcactaatccagtgaaattgatggtgccgtcattggcagcgtgtgcggtttgcgatgcagcagcggccagggcaatagcggccgcgagggtagagagcgtgttgaatttcatagtattcccacttcgtgaattatctttttgatccgccacaggcagcgatcgctgcaccgggttttatccaagtggcggagcacataatgtgtcgtggaaagagtatgttgcctatagagaagtctctagatttgcctcgtgattattcgaaaatctcctggctgattcaaagtagttgtatttactttttttgtaagagtgggatgtaagacgcagctgaaagaaaaggacttattattgttgcgtgttgatacctgcgtgtagctgggatataccgtgctcgaactaaagagagaatgttcgtaatgagcggtaatcacttgagcgggtttcttgatgcctacttccacatccaatatacacaccatcatgttgcttgatgatcatgagatggttcgacaggggatcgagctggggttgggcaatgaggcagaccttgcggtgatcggctctttcggcacgggcaaggagttgctggaggctttggcgctgaggccggcggatgtggtggtgatggacttcatcctcggcccttccgacctggacggccttggcttgatccagacgttgagccgacgcttcaggcaatgcaggccgattgtcgtatcctcgcactacaccccggcgaccgtttcattggcgttgaaggcgggcagttggggagtcttgggcaagacccagaaactgacggagttaatcacggctatccgaacggtcgcccaaggccgtatctacttgcagccttgtatgctgtcggccatccagggcatgcagcctgtttctgagatgggcaacatgaaatcgaaaatggacccatcaagttcattacggctgaacaccagcctcacacccaaggagcaagaagtattgcgctgtttcctcgatgggatgtcagtgagttcaattgcggcaaagttttcgcgcagcgcgagtacgatcagcacgcagaagcaatcagcctatcggaagttgggtatcaagaccgacagtgaacttttcaagtttactcagcagtttgacgtacttgaatagtgaaaaggctgtaagaaagttttcttgcgctcgaaagttaattcgcgttgtccaggtaacttagcgctaattgttcaatagcctgtcgcgccggcgacaacaagtgcggcgcgaccagcatcatgacctggtagaccgccactcgcacttcgccctcccggtcgagaatgcgctggtaatccagggagaacagcaaggtcatggtgatctgttccaccaattgccccagtgcctgggtgtcgctggccaactggccggcggccttcaatcgcgcgagcagggacgccagggtgcgctttagcgccgtgagcaggttgcggatgcccttggccaatttcggcaggcgtcccgccaggtttgacaggtcctggaacaggaaccggtaatgcgccatgcgctcgacgatcaggtgcaggaacagccagtaatcctgtggttccagttgcgcgtctgccggtgggtcgagcaagggcgtcagttcattctggaagcgctcgaacagcccgagcaccaagggctccttgccatggaaatggtagtagaggttgccggggctgatccccatttcattggccacctccatggtcgacacgttgggttcgcccttctggttgaacaattgcagggcacattcaaggatacggtcgcgggtcttcatccagtcttcttaatgtgatcgttgagctcagcgtacgcgcacgtaagtgcccggtgccgcttccatcggtgggtaattctggttgcccagggcggtgagggtttcgcgttgcacgccggaacgctgctggatccactccagccaccgcggccaccagctgccttcgacatggtcggcgtcgtagtaccaggcacgtgggtcgctgctcagcttgaggttctcgacgtagttggccttggggttgcccggcgggttgagaatgctctggatatgcccgctgttggacagcacgaagcgccgctcaccgcccagcaattgggtggagcggtacaccgcatcccacggcgtgatgtggtcgttgatgccggccacgctgaaactgtccactgtgaccttctgcaaatcgatgggcgtgccacagacttccaggccgccgggatggctcagcgggttgtgcttgaagaagtccagcaggtcgccatgcagggcggcgggcaggcgcgtgttgtcattgttccagtacaggatgtcgaaggccggcggttccttgcccagcaggtaattgttgatccagtagttccagatcaggtcattggggcgcatccaggcgaacaccttggccatgtcacggccgtcgagcacgccttgctggtaggagcggcgcttggcggcttccagggtctgctcgtcggcgaacagggtggcggggctgtcgatctggctgtccagcaggctcaccaagtagctcgcgctggagatgcggcgcagctggcgcttggcttgcaggtggccttgcagcgcggcgatggtcaggccgccggcgcaggcgcccatcaggttgacctcgcgggcgccagtgatcgcgcggcagacgttaagcgcttcctccagcgcggcgacataggtggagaggccccattcgcgatgccgcacatccgggttgcgccagctgaccatgaaggtctgcaggccgtttttcagggcgtactgcacaaagctgttggccgggctcaggtcgaagatgtagtacttgttgatctgcggcggcaccaccagcagcggcttggcatactgtttttcgctcatgggcttgtactggatcagctccagcagctcattgcgaaacaccactgagcctggggtggtggcgaccgtcttgcccacttcgaaggcgtgcttgctgacttggcgcggcaggccattgttgtgcagcaggtcctcgaacaggttgctcaccccgcgcaccacgctgttgccgccggagttgagcagctccttgatcgccaacgggttgagcaaggtgttggacggcgagaccgcatcgttgagcaacgagaaggcaaagtgcgcacgggctcggtcatcggcgctgagggtgctgtcatcgatccagtggcgtgtctgcttctgccagctcaaataggcctgcaggctgcgccggtacaggggatttagcttccaggtggggtcgttgaagcggctgtcgttggggttgggttcgtgcacggtttcaccgagcagcacgcgccccagttgcccgctcagcgcccaggcatgccgaacggtatgcaccgggttgcgcaagccatgggcagccacgctgcgcagcgtcgacagcaaatcccggccgcgcaggccggtgatcgcattttgcgcgttgatgaacgcggcgggtgtgggcgccgggttcgtcacgggtctttctcgcatgagccaacactccttcgtcaagccatcaaacgggcacgccaattcagaaccatagtcggttcctggcaagttgcgcggcagtgtggtccttacacggccggtcgcggatgaatcaccgcgcgcatgcgctcctcttcaagaaacttcatgatgatcggcgccacggcttcggcccgggtgatcaggaacaggtggccgtcatcgatgatgtgcaactgtgcattgggaatgcgccaggcgagcatgcgcatgttgatcagcgggatcagcgggtcatcgtcccccgccagcaccagggtgggctggcggatcttgtgcagccagtggatgctggtccagcccagcccggcgaacagttgccagtagtagccgagcttgccggccgaacgcactttgctggcgtgttcggcggccagtttcgaatcgcggcggaacgaaccgccgtagatcatcggcgcgatgcgcaccacgtgggacggctggatgtagcggcgcgggctggccatcagccacagtaccttcggcttgcccggcaccatcaccgcacccgccgccgtggctgcgaggatcaacttcttgcaccgctccgggtagtcataggcaaactgctgcgccagcgcgccgccccaggacacgcccaccgcattcacctggccatagtccaggtaatcgagcatacgcgcggtgagtttggccaaaccgggaaagcggtacggccgattgggcgtcgacgaaccgccgacgccgggcacgtcgaaggcgatcacttccaggtccgggtccagtgcctggatgaacggaaacaccagctcaaggttggcgccgatgccattgaagatcagcaacggcgtcaagtgaggcttgccggggcgtaccgccgtgcggatggtctggccatccaggtcgatggtacggaagatgaacggttgcggcatgctcaaaccctgtgaagtgttacagccggaatgcggtcaatgtgggagggggcttgcccccgatagcggtgtgtcagttacagttgtatcaacggacagtcagccatcgggggcaagccccctcccacatttgaatgcatttcaatttagcgttcgtgtacgtaggtgcctggcgccgcctctgctgcggcataggttttattccccaaactcgtcggcgctttcttcaacttacccgctcgctccgcctgccacgcctgccaatgcagccaccacgaatccgtatgcttggtcgcattctcctgccactcaagcggcttgcccgccaggccatcgctggtctggtagcgcgccttggggttgcccggcgggttgaggatgctctggatatgcccgctgctggacagcacgaactcgaccttgccaccaaacagctgcgccgacttgtagcaggattgccacggcgtgatgtggtcgttggtgccggccagtgaatagatatcggcggtgacctgcttgaggtcgatgggcgtgccgcacacttccagggcgttggcgcgtaccaatgggttgtttttgaacagctcgatcaggtcgccatggaacgctgccggcaagcgcgtggtgtcattgttccagaacaggatgtcgaacaccggcggctcgttgcccagcaggtagttgttcacccagtagttccagatcaggtcgttggggcgcatccaggcgaaaaccttggccatatcgcggccttcgagcacgccggcctggtaggaatggcgcttggccgcctccagggtctgctcgtcgacgaacagcgccacctgggtgtccagcgtggtgtccagcacgctcaccagcagggtcagggcgttgaccttcttctcccccagcgccgcgtaatggcccaagagggcggtgcaggtgatgccgccggagcaggcgccgagcatattcacgtctttgctgccggtgatcgcggtgaccacatcgacggcttctttcagcgcttcgatataggtcgacaggccccattcgcgctgggccttggtcgggttgcgccagctgacaatgaacgtctgctggccattgcgcaggcaaaagcgcgccaggctcttctccgggctcaggtcgaatacatagaatttgttgatctgcggcggcaccaccagcagcgggcgttcgtgcacctgttcggtgatcggcttgtactggatcaactccagcacgtcattgcgaaacaccaccgcgccttcggtggtgcccagggtcttgcctacttcaaaggcacccatgttgacctggctgggcatgccgccgttgtgcaccatgtccttggccaggtgggacaggccgtcgagcaggctcttgccgccggtttcaaagaaacgcttgaccgccgccgggttggccgcgctgttggtaggcgccatggcttcggtcatcaggttgatcacgaagtggccgcggctgatgtcctgttccgacaggttgctgtcgccgatccagtcgtgcagttccttgcgccacgccaggtaggtttgcaggtagcgcttgtagagcgggttctggctccaggccgggtcggtgaaacgacggtcatcgctttccggcaccagcgcggatttgccaaacatcacattcttcagttcgacgccaaaatgggcgacgtgcttgacgctgtgcaacggttgcttgatggcttgggtcagcaccatcttcgccgaagcgagtaaatcctttttacgtaacgcgatgatcgggttgagccccagagtgttttccgaggcctggcgtttcaagtcatcgttgttcttgttactcatctacgacgctccattgtccgaaagacgagtaccggggaccgctgcgcacccagtttcgatacacaacacaagcctggtactgcgactcgggtgaccgttgataccacatcgtcaaatgcagggaacttgccagttccattggttacccgagtttaatttttttcgcaagcgggccaatcgttggccacgcgacagggcattcaagcagatgaaattagaaaatgcgctctaaagagcaagacgcctgagctagagcatcagccgtacgaccgactcgctcgggtcgcgggttttgccggcggctttgagttcggcaagatagtcggcccacagtgcgtcctgacgcacggccaactggtagaggtagtcccaggtgaacagtccgctgtcatgcccatcgtcgaaggtcagtttcagtgcgtactggccggccggttcgatcttgaccaacttcacgtggagcttgccgaattgcaggatcggcttaccgtggccctggacctcggcggaaggcgagtgggtgcgcagcagttcggcaggaagctggtacacctcgtcgggcccgtaagtgaggctgagggtgttggaggttttgtgcaggtttactgcagtaggaaatttggtcattgatgatcatcctgaacgaaccgacatcaaaatgtgggagggggcttgcccccgatagcagtgtgtcagtcagcccatctggtactgatacaccgctatcgggggcaagccccctcccacaataaagcaaagcagttctgagtgaggcttacagaatgtagcgcgacaagtcttcgttctgcgccaattcgcccaagtggctgttgacgtattcagcgtcaatcttgatcacgtcgccattctgcgcaccggccaggtcgccagcactgaaggatacttcctccagcaagcgctccagcaaggtgtgcaggcgacgggcaccgatattctcggtcttctcgttgacttgccacgcgatctccgccaggcgcttgatgccgtctggctggaactcgatgcccagaccttcggttttcagcagttcacggtactgctcggtgagggacgcgtgcggttcgctgaggatacgttcgaagtcgcccggggtcagcgccttgagctccacgcgaatcggcaggcggccttgcagctccggcaccaggtcgcttggcttgctcaggtggaacgcaccggaggcgataaacaggatgtggtcggtcttgaccatgcccagcttggtgttcacggtgcaaccttcgatcagcggcagcaggtcgcgctgtacgccttcacgggacacatcgacgccgccggagttaccgcgcttggccaccttgtcgatctcgtcgataaacacgatgccgtgctgctcgaccgcctccagggccttggccttgagttcttcctcattcaccaggcgcccggcttcttcgtcgcgcaccagtttcagcgcttccttcaccttgagcttgcggcttttcttctttcccttgcccatgttggcgaacaggttctgcaattggctggtcatttcttccatgccaggcggagctgagatgtcgacgccggacacttcagcgacttcgatctcgatttccttgtcgtccaactggccttcacgcaggcgcttgcggaacagctggcgggtgttggaatccgaagccggtgcggcgtcttcgttgaagcccatgcgtgccggtggcagcaaggcgtcgaggatacgttcttcagcggcgtcttcggcgcgatggctgaccttggtcatttcctgttcgcgcagcatcttcaaggcagcgtcagccaggtcacggatgatcgactcgacgtcacggcccacatagcccacttcggtgaacttggtagcttcgaccttgatgaacggcgcgttggccagcttggccaggcggcgggcgatctcggttttaccgacgcctgtagggccgatcatcaggatgttcttcggcgtcacttcaacgcgcaattcttcgggcagttgcatccggcgccagcggttacgcagcgcgatggctacggcgcgcttggcatcgtcctggccgatgatatggcgattgagttcatggacgatttcgcggggagtcatggacatagtgtttggcggcctcaagcgggaataagcctacggcttactcggcgaggtcctgctcctcaatggtgaagttgtggttggtgaacacgcagatatcgccggcgatacccagggcggtctcgacgatttcgcgggccgacaggtcggttttcttcaacagtgcgctggctgccgcctgggcatagccaccgccggaacccatggcgatcaggccatgttcgggctcaaccacatcgccgttaccggtgatgatcagggacgcgtctttgttggcgacggccagcatggcttccaggcggctgagggaacggtcggtgcgccattctttggcgagttcgacggcggcgcgcacgaggtggccctggtgtttttccaactggccttcgaaacgttcgaacagggtgaaggcgtcggcggtagcgccggcaaagcccgcgagaacctggccgtggtacaggcgacgcactttcttggcgttgcctttcatcacggtattgcccagggaaacctggccgtcgccgcccatgacgactttgccgtggcgacgtactgaaacgatggtggtcaaggggagagtctccacgcagcggggcgaaaatgccctgatggaaactcatatgggggtggcgggggggatttcaaccgtaggggggtatggcggacgagtggtggtcacgggtctgacacccactccagaaagctgcaaaaccaaatgtgggagggggcttgcccccgatggcagtgtgtcagtcaccgaaaatgttgactgatctactgctatcgggggcaagccccctcccacattctgatcggtgttgagcttgaatcagcggctctggcgttgttgtaacaacaggttgctaaagcccgcaccagccagttgcttctgcgctacagtcagttgttcacggttgctgaacggacccaccagtacgcgataccaggtcgcatccttcaccgtgccagactccaccgtcaccgactggcccagcagaatgatctgcgcccgcacgcgatccgcatctgcctgtttggggaacgagcctgcttgcaggaagaacttggttaccggcgcggccttggtctcggccaccggcggtgccggcggcggggtgatcccggccaatgcggcctgggcacgcgccgtgtcgatcttcgcggcttccgccggggtgaccggggtggtcggcacttgcggcgtcggcagggttttctccggcacggcgtccggcggcacgatcacttccgattcgggcaacagtgtgtagaagtcgtacttcggcttcaccggagcggtcgggctcggcgcagtcttgttggcttcggccattttcgtagccttctgctgctcctgcttgacccgtttgacgtcatcgcccttgcccggatccagtttcatcaggaacacgataaacgcgccgacggtgaggccgatcgccatccacaaccagcccgggatcggcttcttcgccggggcctggtagcggctggcgccgcgcttgggtgctggttttttcttggcagccaacttacatacgctccagtgtttccaggcccaacagttccaggccttgcttgagggtccgtccggccagggcggcgaggcgcaggcggctttgcttctgggcttcgtcgtcggcggtcaggatcgggcagttctcatagaagctggagaacaggccggcgacttcatacaggtaggtgcacaggatgtgcggcgtacctttctcaccgacgctgttcagcacttcgccgaattgcgccagcttggcagccagttcctgctcgtgcggggcgtccagcacgatgtgcccttcaacttcgctgaagtccttgcccagcttgcggaacacgccggccacacgggtgtaggcgtacagcaggtacggtgcggtgttgccttcgaaattgagcatcagctcgaagttgaagctgtagtcgctggtgcggtgcttggacaggtcggcatatttcaccgcgccaatacccaccacgcgggcgatgttgcgcaggtcggcctcggccaactccgggttcttttccttcaccaggttgtaggcacgttcctgggcttcggtcagcaggtcgatcagcttcacggtgccgccgtcacgggtcttgaacggacggccatcggcgccgttcatggtgccgaagcccatgtgctccatgtgcatcgggtgggtgacaaaacctgctcgacgcgccacttcgaagacttgttggaagtgcagggcctggcgctggtcgacgaaatacagcgcacggtccgccttgagcacgccactgcggtagcgcacggccgccaggtcggtggtggcatacaggtagccgccatcggccttgacgatgatcaccggcagcggctcgccatcggcggtcttgaactcttcgaggaacacgcactgcgcgccgttgctttccaccagcaggcctttggccttgaggtcgttgaccacgttgatcaggtcgtcgttgtaggcgctttcgcccatcacgtcggccatggtcagcttgacgttgagcagctcgtagatttcctggcagtgcgacagcgagatctcacggaagcggttccacagcgccaggcattcctgatcgccggcttgcagcttgaccaccaggccacgggcgcggtcggcgaactcttcggattcgtcgaagcgcttcttggcggcgcggtagaagttttccaggtccgacagctcgttgctggtgatcgggttctcttgcaggtaagccatcagcatgccgaactgggtgccccagtcgcccacgtggttctggcggaccacggtgtcgccgaggaactctagcacccgtgccacgccgtcgccgatgatggtggagcgcaggtggcccacgtgcatctctttggccaggttcggtgccgacaggtcgatgaccacgcgctgcagtgggccggccttgcgcacgccgatcctggcgtcggccagggctgcatccaggcgcgaagcaagggcctgggtattctggaagaagttgataaaaccggggccggcgatttcggccttggtgacgctttcgtcggcaggcagcgcggcgatgattttttccgccaggtcgcgcggtttcatgccggccggcttggacagcatcatcgcaatgttgctggcgaagtcaccgtgggtcttgtcgcgggtgttttccacctggatcgccggcgacaggccttcaggcaacacaccttcgttgacgagttgggtgagggcttgttggatcagctggcgaatggtgtctttcatggtgttctctttcgaccgcaagcggcggcgcgcgatgcgcaggtggaaaaactgggcattatccgtggcgagggcgggcttgccaaccttcgcgggacctgtggccagggttaatacaaatctaccgggtctacgtccaacgaccatcgcacttgccggccgctgggcatttgctccagggcaagcaaccagctacttaataggcggtgcagcggcgcacgggaggttgcctgcaaaagtagctgagcgcgatagcgcccggcacggcgctccatgggtgcaggcaccgggccgagcagttcgatgccgctcagacccagttcgcccagcaaacgttcggcggcgctgcacgcttcatccaggaagctctcggcctgccctggtttgtgcgcctcggcgcgcagtaatgcaaggtgggaaaacggcggcaggccggcggcgcgacgttcgctcagggcctgttcggcgaaggcgaagtagccttgctcggtcagttggatcagcagcggatggtcggccaggtgcgtctggataatcacccggccaggctcctcggcacggcccgcacggcccgcgacctgtacgatcaactgcgccatgcgctcgctggcgcggaaatccccggagaacagcccgccgtccgcatcgaggatcgacaccagggtcacccgtggaaagtgatgtcccttggcaagcatctgcgtgccgatgaggatgcacggctggcctttctggatggtggcgaacagctggttcatcgcgtctttgcgcgacgtgctgtcgcggtccacccgcagcaccgggtaatccgggaacaggatgcccaggcgctcttcggcgcgctcggtgcctgcgcctaccggtcgcaggtcgactttgccgcactgcgggcaatggcgtggcacccgctccacatggccgcagtggtggcagcgcagttcgccgtggcgctggtgcacagtcatgcgtgcgtcgcagcgttcgcactcggacatccagccgcagtcatggcacagcagggtcggcgcaaaaccccggcgattgaggaacaccagcacctgttgaccggcggcgagggtctggccgatggcttgttgcatcggcccggaaatgccgctgtccagcgggcggcttttgacgtccaggcgcaggaaacgtggttgcttggcaccgcccgcccgctcgttgaggcgtaggaggccgtaacgaccggtgtaggcgttgtgcaggctttccagggacggcgtggccgagcccagcacaatcgggatgtcttcctggcgcgcgcgcaccagcgccaggtcgcgggcgtggtagcgcaggccttcctgctgtttataagagccgtcgtgttcctcgtcgatgatgatcagcccggggtttttcatcggggtgaacagcgccgaacgggtgccgataataatgtcggcctcgccgtcccgcgccgccagccatgactccaggcgctcgcggtcgttgaccgccgagtgcaccagggcgatgcgcgcattgaaacgctgctcgaagcgcgccagggtctgcgggccgaggttgatctcggggatcagcaccagcgcctgtttgccggcttgcagggtctcgcggatcaactgcaaatagacttcggtcttgccgctgcccgtgacgccggccagcaggaacgcgtggaagctgtcgaagcctgcgcgaatcgcctcgtaggcggcgcgttgctcggggttcagcggcaattccggctgggccagccagtgttcgtggcgggcgtcgggggcgtgcttgcgaatttccacctgcaccaggcctttggcgagcagcaggtcgaggctgtctttgctcagcatcagcttgctcagcagctgatgcgccacgccatggggatgctgcgccagcgtggccagggcctcgcgctggcgcggcgcgcgggcgatacgcgggtcgtcgaggcgcgcgccgggcaccatcgaccagaagcgttcctggcgcgcttcggccagttcgccctggcgcagcagcaccggcaacgcccagctcaaggtgtcgcccaggctgtgctggtaatactgggcggtccacaggcacagcttgaacagcgcgggcggcagtggtggggtggcgtcgaggatggccagcgcgggcttgagcttctcggccggtacttcgctgtgatcggtgacttcaaccagaatgccgatcatctctcggcgcccgaacggcacgcgcacacgcatgcccggttgcaactgcgcccgcagtacgccggccggcgcccggtaatcgaacaggcggcgcaggggcgagggcagggctaggcgcagaatggcgtcgggcacgcggggagtctcatataaaggcaggcggtggcgcaggggcgggagcctagcagacaggggagggcttgggtatgccacggttttctgatgaaaggaggttttcagccggatgtgcggcttgcgcgattgaaaaggtctggtagaatccgcggcctaattacgtgcggtattcgacaatagtgtcgagtggcggcacgctagcccgaggaagtgccatgaaagccgatatccatccagcgtacgaaaccatcgaagtcacctgcagctgcggcaacaagttcgaaacccgttcgaacctgtgcaagccactgggtactgacgtatgcaacgagtgccacccgttctacaccggtaagcagaaaactctggacaccggcggccgtgtacagcgcttcgcagatcgctttggtgctttcggcaagaagcctgctgctactccagcagagtaaggctcaaaagccttatgggcttttgccagctgttgaaaaaggcgtcccttgtgggcgccttttttgtgcctgggatttggccttcagtcgcacaggccgacgtgttttgccccgcaccggccgccctggcccgggtggatgtgcagcgtgtggtggatggcgacaccgtgcgcctgaaggatggccgcagtctgcggatgatcggcctcaatgcgcctgaaaccggcaagaaaggccgctccgacgagccctatgccgttgcggcccgccagcgtttgcaggcgttggttgaggccagtggcggccgggttggcttggtattggggcgcgagagcaaagaccgttacggccgtaccttggcccacctttacggcgctgatggcgagaaccttgaggcgcaactgctggccgaggggctggggttccaagtgggcgtcgcgcccaacgtcgatctggtcacctgtcagcaggctgctgaaaacagcgcccgtcaggcgcgattgggcctgtggcgcaaatcacccgtgctaagcgtggcacaactcaagcagtccggcttcgccttggtcagcggccgagtgagcaagatcgaacgcaatcgcggcggaatctggatcgaattgcagggctcactggtattacgcattgcacccgaactcactcgccacttcgactccgcattgctcagtggtctgcaaggcaggacaatcgaagcccgtggctgggtgcaggatcgatccaaacggggtggccggaaaaacggtcaggcacgttggttgctgccactgaccgacctcagcatgctcaaatcgactgattaataaaaaattgtagacatttttttattcgattgtgaacagttaagcccttgtatcccgtggccttagaccaaagtacggcgctttggggccttgacacctgtgactacccagtcttgtagggactttgcgacacgcgtatcctcggcggtccgtcgaccaacagtaaaagcggaatgccgatatgtctgatttgaaaactgccgctctcgaatatcatgcccatcctcgtccaggaaagctgagtgtagagctcaccaaggccactgccaccgcccgcgacctgtcgctggcctacagccctggtgttgccgagcccgtacgtgaaatcgcccgcgaccccgaactggcgtacaagtacaccggcaaaggcaacctggttgcagtgatttccgatggcaccgcgattctcggcctgggtaacctcggcccattggcttccaagccagtcatggaaggtaaaggcgtgctgttcaagcgctttgccggcatcgacgttttcgacatcgaagtcgactccgaaagcccgcaggcgttcatcgacacggtcaagcgcatttccatcactttcggtggcatcaacctggaagacatcaaggcacctgagtgcttcgagatcgaaaaggccctgatcgaacagtgcgacattccggtattccacgatgaccagcacggcaccgcgatcgttaccgctgccggcatgatcaacgccctggaaatcgctggcaagaccctggctgacgcgcagatcgtctgcctgggcgccggcgctgcggccatctcctgcatgaagttgctggtgagcatgggcgccaagctggaaaacatcttcatggtcgacagcaagggcgtggtccagtccgagcgtaccgacctgaaccagtacaaggcgatgtttgcccacgccaccgacaagcgcaccctggctgacgccctcgacggtgcagacgtgttcgtcggcctctccggcccgaacctgctgagcgccgaaggcctcaagtccatggcggccaacccgatcgtgttcgcctgctccaacccggacccagagatctcgccggaactggcgcacgccacccgcaacgacgtgatcatggctaccggccgttcggactacccgaaccaggtcaacaacgtactgggcttcccgttcatcttccgtggcgccctggacgttcgcgccaagcgcatcaacgaagagatgaaagtagccgccgccaatgccctgcgtgaactggccaagctgccggtgcctcaggacgtgtgcgacgcctacggtggcgccaagctggaattcggtcgtgagtacatcatcccgaaaccaatggacaagcgcctgatcaccctgatctccgatgccgtggccaaggccgccatcgagaccggcgtggccaccctgccgtatccgaagcactacccgctgcaaagcgtggatgatgtgttcaacggctaagccgttgtagcgcaccaacaaaaagccccggttcttgcgagtcggggctttttgctgtgtggtgttcgccgatggcctttgtagtgagcgggcaagcccgctcactacaggtcagaacagatcgatcggcgccgcttcatctgccggcagcgggctacccggtgcaacgccattgcccagctcgttgaccgacggcggcgtgtcttcgctcttgaacagttcgaagtacgcgttcggcgtgcttggcgacgctgcacggccgctgatcgggtcgatgcgcaggctgaggatgccttccggctccggctgggtgtgcggcggcttgtccttcaaggctgcgcccatgtagctcatccagatcggcagcgcaacggtgccaccgaactcgcggcggcccaggctttccggctggtcatagccggtccacacggtggtcacgtagtcggcgttgtagccggagaaccaggcatccttggattcgttggtggtaccggtcttgccggcgatgtccggccggttcagcgccagagcgcggcggccggtacccttcttgatcacatcttccaggatgctgttgagaatataagtggtacggccgtcgacaatacgctcggcaactgccggcgcctgtggctccgccggggtaccgttggcggctggcgtggtgcctggggtcggctcgatggtgataccgccattgctcggcgctgccagcccatcggtggcggccacgccgttgaccacgtcgcctggcacgcgtggcgggttggcggtgaacagggtgtcgccgttgcggctttcgatcttgtcgatcaggtacggcgtgatcttgtacccgccgttggcaaaggtgctccagccggtggcgatttccatcggtgtgagggtcgcagtgcccagggccagggagaggttgggcggcaggtctgacttggcgaaaccgaagcgcgtcatgtaatcgatggtcttgcccacgcccattgcctgcagcaagcggatcgacaccaggttgcgcgacttgtacagcgcttcgcggatgcggatcgggccaaggaaggtgttggtgtcgttcttcgggcgccagaccttgtccaggtactcgtcgacaaacacgatcggcgcatcgttgaccaggctggcggcggtgtagccgttgtccagcgcggcactgtagatgaacggcttgaagctagagcccggttggcgcttggcttgggtggcgcggttgtagttgctctgctcgaacgcgaaaccaccgaccagggcgcggattgcgccgttctgtgggtccagcgacaccagtgcgccctgggccaacggcacctggctgaacttgaggctgtcgtccttctgacgttgcacgcggattaagtcacctacctgcgctacgtccgacggctgcttgggcatcgggcccatgctgttggtgttcaggaacgggcgcgcccatttcatgctgtcccacgccacatgggcttcgccggtgcgggtcaggacctgtacgccatctttcttgacctgggtgacgatggccggctccaggccgctgatcgcacgttgtttgcccagttcggtggtccaggcactcagggtcttgcccggcaggcgtgattcggggccgcggtagccgtgacgctggtcgtaggtgatcaggccggaatgcaccgaattattggcgatgtcctgcaagtcgctcggcacggtggtagtcacgcggaaaccttcggtatacgcctcgctgccatagcggccgaccatctcggcgcgggccatttcggcgatgtaaggggcgttcacttccggggttggtacgtggtagctggcgttcaacggctcggcgatggcgctttcgtaagcggcctggtcgatcttgcccagcttgtacatgcgtcccaggatccagtcgcggcgctctttgctgcgcgccgggttggccagcgggttgaagcgtgatggcgccttgggcaggccggcgatcatggccatctgcgccaggctggcatcacggatggacttgccatagtagacctgcgaggccgcctcgatcccgtaggcgcggttgcccaggtagatcttgttcacgtacagctcaaggatctcatccttggtcaactggcgttcgatctgcaacgccaggaggatctcggtggccttgcgcgaaaagctgcgctcgctggtgaggaagaagttcttcgccacctgcatggtgatggtgctgccgccggattgaatgtgtccgctttttaccaattgtgtggccgcacgcaccaggctgctggggtcgacaccatagtggttggcaaaattatcgtcttcggccgagagcagggcgctgatgaaattgggtggaatatcggcaaaacggatcggtgtgcggcgcatttcgccgaactccgcgatcagtttttcatcgctgctgtagacccgtaaaggaatctgcaactggatacttctgagggcctctacggagggcaaacccggactaaggtagaggtaggccccgctgagcacgagcagcagcccgcaaacgatggcgacaatggagtacccgaaaaacttcagcagacgaatcaaggcttttggatttccagagaaaagaatgggttaggcgtcggggctggcatggcaaacgatggatcgacccgagctgcagataaaaagcggcaaaaaacgctgggcattaaagcatttttcgacttggggcgtcattcgcacctgctcaacaagtcgaccgaatgcatgacgcccggcggcaatcaggcggtatgacaggcaaagctttagggagttttatgggaaaaggatttttcacgggaaaactcgacaccttgctgggcgtcgacatcaatgacacggcaatccggctggtggagctgggccgttcaacctctggttacaacattcgcggctacgtcacccaggcattgccgatacgctcggtggtcgacggcacattcctggatctcgaaggcgtgggacgcaccttgcgcagtgcattgtcacggttggcgacgtcggtccgtggcgctgccgctgcggtgtccgggccttcggtgatcacgcgcatgatcgagatggaggcggggctgactgacgatgagatggcctggatgatccagatggaggcagaccagtacattccttatccattggatgacgtggccatcgactttcaagtgcgtgggcctaccgccctggacccaggtcgtgtcgaggtgctgctggcggcgtgcctgaaggaacatgtcgaggcacgggaggcggttctggcgctggccgggctggtgccgagggtgatcgatgtcgaagcgtttgcattggcgcgcgcttgcagtcaggatttcgccagcttcacgccgagccatcgagtcgatggtgcacaatgggccgtggacgcccaggggatgggaattgcttgcgggttggccctgaggagtttcgcttgaagacacgaatcaaccttttgccttggcgccaggcgctggcggagcggcgacgcaagtacctgctggcgtgtttgctggcgttcgcctgcgcggcgcttgcggctgtgtggctggcggaccaggtgatcgaccaggccattgaccggcaagtgacccgtaatgaccatctgggcaagcaaatcaccggcctcgattcgcgcatcaggaccatcgacgacctgcaggagcaaagccagcagttggcacagcgcatgaaggttgtgcaggacctgcacgactcccgctcgtccggcgcgcaattgttggatcagttggcgcgcgcagtacccgatggtgtgcatctgcatgaagtggtggcgaagggcgatacggtgagtatcagcggcagtgccgaatccagccaggatatcgcccaactgatgcgtcgcctggaggccgcacaaggcgcccattccacgcggttgcaacaggtgcgaaccgaaggtgcgcggggcaacaatgaattccagttgatggtgcgacagggcgagcccgccgaggcgcaaccttgagcccgttgaggctcaatctttctgcactcactcacaacgctgcaaaatggcccctacctggcaaggccctgttgggctgtgcgctggcgagtctgatatttgtggtgggtgaccttgtttgcctgagcccgtcgcggcagcggctaagccaggtcgaggtgcgggaagtggccctgcaacagcaagtcgctgaaaagacggccctggctgccccccttgaggtgcgcacccagcagctccaattgatgcaggcgaaagcggatgagcttttccgggcgttgccggggaaatccgaaatgcccggcttgctggaagacatcgcgcacttggcagtggccaatggtctggtggtcgagagtgtcacgccatcggacgaacagtctcagccgtactatcacgagcagccggtacaggtcggcgtggcaggggcttaccacgacctggcgacgttcctgagtagcttgggtggtctggcgcgaatcgcgacggtgcacgatgttgtcctgcgacgtgatggcaatctgctgcgccttgatgtgctggtcaagacctattggcagccgggcggcgggggaggtggtcaggcccgccaggggcaactctttgtctacgaggcttccgggctgcgcgacccttttcaacggcttgccgttcaggtcgatcacctgcctgggcggcccgcgcgtgcgccagacctcgcccggccacgcgcagccctggaaagccttgcgttggaccagttcgaaatggtcggcacgctgtcccgcgggtcgcaggtcttcgccttgctgcgtgcggcctccacggtgcatcgcctggcggtcggtgactacctggggccggaccatggccgggtcacggccatcgatgagcgttacatagagctggtcgagctgtttcccgatggtcagggggcatggctggagcgcccacgaaccctggtgttaaacgtcaactcataacggaatcgaatcaatgaaaaggattttctcgtccttcggtgtagcgctatggatagcgttcacggcgccgatggctgttgctgtgcccaatcgtgtagacctgatccagttgccaccgcctggcaatgccacgtcgggcgcctacaccggcgataagctgaaccttaacttccagagcatcgagttgcgcaccgcgctgcaacagattgccgatgtagcgggcctcaatctggtagccagcgacgatgtgcagggctcgattaccctgcgcctcaaggatgtgccctgggatcaggcgttggacctggtgctgcaagccaagggcctggataagcgggtaaaggccggtgtattgctggtcgcgccggccgaggagttggcggcgcgtgagctgctgaccctggaatcgcgcaagcaaatggctgaactggcgccgttgcgtcgggagctgttgcaggtcaattacgccaaggcggcggacctggccaagttgtttcagtcagtcacgggccttgagggcgtcaccgacgagcgtggctcggtggcggtggatgatcgcaccaacaacatcatcgcctatcagactggcgagcggctggaggagctgcgcaggatcgtggcgcagttggatgtgccggtgcgccaggtgatgatcgaggcgcggattgtcgaggccaatgtcgattacgacaaaagcctgggcgctcgctggggtgggcggctcactcgcggcaactggggcgccggcggtattccgaagcctctggcggatggcgcggagcctgcggaaaacccacccagttcaccttttgtggacttggggtcactcaccggctcatcgggcctgggcatcgcctttatcaccgacaacctgctgctggacctggaactcaccgccatggagaaaaccggcaacggcgaaatcgtctcgcaacccaaggtggtcacttccgacaaggaaaccgcacgcatcctcaagggcaccgagattccctaccaggaatccagctccagcggcgcgacctcggtgtcgttcaaggaagcctcgctgtcgctggaggtcaccccgcaaatcacccctgacgaccgcgtgatcatggaggtgaaagtcaccaaggatgagcccgactacctgaacaaactcaacgatgtgccgccgatcaagaaaaacgaggttaacgccaaggtgctggtcaaggatggcgagaccatcgtcattggcggggttttctccactacccaaagcaaagtggtagataaagtgccatttttgggcgatgtgccgtatcttggccgccttttccggcgcgatgtgctggcggagaaaaaatccgagctgctggtattcctgactccgcgtattatgaataaccaggcgattgctgtgagtcgttgattctgtgcgaaatttgattcttgtaggaccgatgggggctggaaaaagcaccatcggccgtttgctggccaaagagctgcgcctgccgttcaaagattccgacaaggaaattgaattgcgcacgggcgccaatatcccatggatcttcgataaggaaggcgaactgggctttcgtgaccgcgagcaggcgatgatcgccgagctgtgcggctgcgatggcgtggtattggcgacaggtggtggcgcggtgatgcgtgacgagaaccgccgcgcgctgcatgccggtggtcgggtggtctacctgcatgcgtcggtcgagcagcaagtgggtcgcaccgcccgtgatcgcaatcgcccgttgctgcgtacggccaacccggagaaaaccctgcgggatctgctggcgctgcgagatccgctgtatcgggaaattgccgatctggtggtagaaaccgatgagcggccaccccggatggtggtcctcgacattcttgagcgcctgcaacggctgccaccccgttaaagccaggcccgaaatgcgctattctcggcggcgcgccaacacctcccaaggtgtggcgtagagccatcaggcgacgtcagcgtttgacgttgccggtcgtcaatacatcttcaacgcggggacacatgcagacacttaaggtcgatctaggcgagcgcagctacccgatccatattggcgaaggtctgctggaccagcccgagttgctcgcaccgcatattgccgggcggcaagtggcgatcatctccaatgaaacggtcgcgccgctgtatcttgagcgtctgagccgcagcctcgcggcgtactccgttatttctgtgatcctgcccgacggcgaggcccacaagaactgggaaaccctgcaactgatctttgatggcctgctgactgcacgccatgaccgccgcaccaccgtgatcgccctgggcggcggtgtgatcggcgacatggccggctttgcagcggcctgctaccagcgtggcgtggactttatccaggtgccaaccaccctgctgtcccaggtcgattcgtcggtgggcggcaagaccggcatcaaccacccgctgggcaagaacatggttggcgcgttctaccagccgcaagccgtgctgatcgacaccgcgaccctcaacaccttgccgccgcgtgagctgtcggcgggcctggcggaagtcatcaagtacgggctgatctgcgacgaaccgttcctgacctggctggaagaacatgtcgacgcgttgcgcaacctggaccaggcggcactcaccgaagctatttcccgctcctgcgccgccaaggcgctggtggtgaatgccgacgaacgggagtccggcgtacgggccacgttgaaccttgggcacaccttcggccatgcgatcgaaacccacatgggctatggtgtgtggttgcatggagaggccgttgcggctggcacagtgatggcattggagatgtcgcagcgcctgggctggatcaacgcccaggagcgtgaccgtggcatccgcctgttccagcgcgccggtttgccggtgattccgcctgaggaaatgaccgaggcggatttcctcgaacatatggcaatagacaagaaagtgatcgacggtcgactgcgactggtgctgctgcgccacatgggcgaagcggtggtgaccgacgattatccgaaagagattttacaggccacgctgggagcggattaccgcgccctggcccagcttaaaggttaataagatcccgatgactagtttgcatgccgacgaggcgttcctcggccattaccagttaagccacgacccttttgctccacgggtgcctggtttcaaatttttcccggcccagcgcaagccagtgctcggtcaactgcaccatctcgcgcgctacagccagttgctgctagtcgtgaccggcccgctgggcagcggcaagaccctgctgcgccaggccctggtggccagcaccaacaagcagtcggtccagagcgtggtggtgtcggcccgtggtgccggtgatgcggcaggtgtcctgcgccaggtcgcccaggcactggacgtggccactgccgagccgaacgcgatcctcaagcaggtggtgcagctgggcctgaccggccaggaagtctacctgctggtggatgatgccgagcagctcgacgaatccgccctcgaagcgctgctggcgctggcggcgggcacgccggaaggccgtccgcatgtattcctgttcggtgagtcgtcgctgatcgccgacctggagcagatcagcggtgatcaggagctgttccacgtcatcgaactgcagccgtacgaagaggaggaaacccgcgaatacctggctcaacgcctggaaggtgcaggggcgggtatcgaacttttctccgctcaacagatctctgatattcacgaaagctccgacggctggcctggcaccatcaaccaggttgcccgcgatgccatgatcgaagccatgattgccagccgcaccgcggtcaagcgtccaaagatggggttcactatgcctaagaaacacgtattggctatttccgccgttgttgtggtcgctgttgccgccgcctggttgattccgggtcgcagcaaggcgccgaccaccgccggtgcgccaaccgagcaggcgcaattgccactgggcaaacccacgccaaatgttgagttcgccaattccggccagccgaccaacctgccgatggtcggccagcctgtcatgcgtggcccgctcgccgaagaagccggtggcatttccgaaggcgacgacggcgtgccggtggaaggttccagcgccacaccgccgaccgtcacgaccacagcaccacctgctggcgtgccagccggtcagccagcggcaaaaccaacgccggcaccgactgttgcaaccgccaagccagcgcctgtgaccaagccggtcgcgcctgcgccagccgccaagccagcgccagccccggccgccaagcccgctgaaaaaccagctgccaccgttgccaaggccggtgctgcgggtagcggttggtacggcagccagccttccggtaacttcgtggtgcagatcctcggcaccagctctgaagccaacgcccaggcgttcgtgaaagagcagggcggcgagtaccgttatttcaagaaagtgctcaacggcaagcctctctacgtgatcacctatggcagtttttccagccgtgcagcggctgattctgccatcaaggccttgccagcgaaggttcaggctggtaaaccttggcctcgcactgttgccagcgttcaacaagaactcgcaacaactcgctgaagatcaggcggccttacccaggccgccctcccggcacctcaaaaaaactacaacagcgtgcagccctgaaggccgcgcgctttgtggtgtctgcgtcacagtggcttttgagtcgtagcggtcagaattaaaaaagttttgactagcacagcatatcgctttaaacctttcataaatgcgacatagatttgcgacatttcgtcgctaaatttgtgagcgtctgtgtcggtgtgtacaatgacctcccttttgcccccgctaagccggcgtacgttcggcgtggaaggtaaccggttgaattgaaaagaaatttgcctcgaaataagaggcagcctggtgagaaagtgtctatgaaagcaggtctgtaccaacccgatgaattcaaggataactgcggtttcggcctgatagcccatatgcagggcgagcccagtcatacccttctgcaaacggccatcgaggccctgacctgcatgacccaccgcggtgggatcaacgccgacggcaagaccggtgacggttgcggcttgctgattcaaaagcccgacctgttcctgcgcgctgtcgcaaaagagcaatttgcggtcgacctgcccaagcagtacgcggtgggcatggtgtttttcaaccaggacccggtcaaagccgaagctgctcgcgagaacatgaaccgcgagatcctggctgccggcctgcaactcgtcggctggcgcaaagtgccgatcgacaccagcgtactcggccgcctggccctggaacgcctgccgcagatcgagcaagtgtttatcgcaggcgatggcctgagcgaccaggacatggcgatcaagctgttcacgtcgcgtcgtcgctcgtccgtggccaacgccgccgacaccgaccactacatctgcagcttttcccacaagaccatcatttataaaggcctgatgatgccggcggacctcaccgccttctatccggacctgagcgatgagcgcctgcaaaccgcaatctgcgtgttccaccagcgcttctccaccaacaccctgccgaaatggccgctggcccagccattccgcttcctcgcccacaacggcgagatcaacaccatcaccggtaaccgcaactgggccgtggcccgtcgcaccaagttcgccaacgacctgatggacctggaagagctcggcccgctggtcaaccgcgtgggttccgactcctccagcatggacaacatgctcgaactgatggtcaccggcggcatcgacctgttccgtggcgtgcgcatgatcattccgccagcgtggcagaacgtcgagaccatggacccggacctgcgtgcattctacgagtacaactcgatgcacatggagccgtgggacggcccggccggtgtcgtgatgaccgacggccgctacgcggtctgcctgctcgaccgtaacggtctgcgcccggcgcgttgggtcaccaccaccaacggtttcatcaccctcgcgtcggaaatcggcgtgtgggactacaaacccgaagacgtcatcgccaaaggccgcgtgggcccaggccagatcctcgccgtggacaccgaaaccgggcagatcctcgacaccgacgccatcgacaaccgcttgaaatcccgtcatccgtacaagcaatggctgcgcaagaacgccctgcgcatccaggcgaccatggaagacaacgaccacggttcggcgttctacgacgtcgaccagctcaagcaatacatgaagatgtaccaggtcacgttcgaggagcgcgaccaggtgctgcgtccgcttggcgaacaaggctacgaggcagtcggctccatgggcgacgacacgccgatggccgtgctgtcccagcgcgtgcgcacgccgtacgactatttccgccagcagttcgcccaggtgaccaatccaccgatcgacccgctgcgcgaagccatcgtgatgtccctggaagtctgcctcggtgccgagcgcaatatcttccaggaatcgcctgagcacgcctctcgtgtgatcctcagctcgccggtcgtgtctccggccaagtggcgctcgttgatgaccctggagcgtccaggcttcgaccgccagatcatcgacctgaactacgacgaaagcctcggccttgaagccgcggtgcgcaacgtcgccgaccaggccgaagaagccgtgcgcgccggtcgtacccagatcgtcctgaccgaccgccacatcgcgccgggcaagctgccgatccacgcctcgctggcgactggcgcggtgcaccaccgcctgaccgaaaaaggcctgcgttgcgactccaacatccttgtcgaaactgccacggcccgcgacccgcaccactttgcggtgttgatcggcttcggcgcctcggcggtgtacccgttccttgcgtacgaagtgctgggtgacctgatccgtaccggtgaagtgctgggcgacctctatgaggtgttcaagaactaccgtaagggcatcaccaagggcctgctgaagatcctgtcgaagatgggcatctccaccgttacgtcctatcgcggtgcgcaactgtttgaagccatcggcctgtccgaagaagtctgcgacctgagcttccggggtgtgccaagccgcatcaagggcgcgcgtttcgtcgacatcgaagccgagcaaaaagccttggcagccgaagcctggagtgcgcgcaagccgatccagcaaggcggcctgctcaagttcgtgcacggtggcgaatatcacgcgtacaacccggacgtggtcaacactctgcaagccgccgtgcagcagggcgactacgccaagttcaaggaatacacctcgctggtggataaccgcccggtgtcgatgatccgcgacctgttcaaggtgaagaccctggacacgccgatggacatcagcgaagtcgagcccctggagtcgatcctcaagcgcttcgactccgccggtatttccctgggcgcgttgtcgcctgaggcgcacgaagcgctggccgaagccatgaaccgcctgggtgcgcgttccaactccggcgaaggcggtgaagacccggcgcgttacggcaccatcaagagctcgaaaatcaagcaggttgctaccggccgtttcggcgtgaccccggaatacctggtcaacgccgaagtgctgcagatcaaggtggcccagggcgccaagcccggtgagggcggccaactgccaggcggcaaggtcaacggtttgatcgccaagctgcgttacgcagtgccgggcgtgacgctgatttcgccgccgccacaccacgatatctattcgatcgaagacttgtcgcagctgattttcgacctgaaacaagtcaacccgcaggccctggtctcggtgaaactggtggcagaagccggcgtgggcaccatcgccgctggcgtggccaaggcctatgccgacctgatcaccatctccggctacgacggcggcaccggcgcttcgccgctgacctccatcaagtacgccggtgcgccgtgggaactcggcctggccgaaacccaccagaccctgcgcggcaacgacctgcgcggcaaagtgcgggtgcagaccgacggcggactgaaaaccggcctcgacgtgatcaaggccgcgatcctcggcgccgaaagcttcggcttcggtactgcgccgatgatcgccctgggctgcaaatacctgcgcatctgccacctgaacaactgcgccaccggcgtcgccacgcagaacgagaagctgcgcaaggatcactacatcggcaccgtcgacatggtggtgaacttcttcacctacgtcgccgaagagacccgtgagtggctggccaagctgggcgtgcgttcgctggaagagttgatcggccgtaccgatctgctggaaatcctcgaaggccagacggccaagcagaaccacctggacctgacgccgctgttgggcagcgatcacatcccggccgacaaaccacagttctgcggcgtggaccgcaacccgccgttcgacaaaggcctgttggccgagaagatggtcgaaatggccggctcctcgatcaacgacgccagcggtggcgaattcgccctggatatctgcaactgcgaccgttccattggtgcacgcatctccggcgaaatcgcgcgcaagcacggcaaccagggcatggccaaagcgccgatcaccttccgcttcaagggcaccgcgggccagagcttcggcgtgtggaacgccggcggcctgcacatgtacctcgaaggcgacgccaacgactacgtgggcaagggcatgaccggcggcaagctggtgatcgttccgcccaaaggcagcgtgtacaagacccaggacagtgccatcatcggcaacacctgcttgtacggcgccaccggtggcaagctgttcgccgccggtaccgccggtgagcgtttcgccgtgcgtaactccggtgcccacaccgtggtggaaggcaccggcgatcactgctgcgagtacatgaccgggggctttgtcgcggtactgggcaagaccggttacaacttcggttcgggcatgaccggcggtttcgcctacgtgctcgaccaggacaacaccttcgtcgacaaggtcaaccacgagttggtcgagatccagcggatcagcggcgaagccatggagtcctaccggaaccacttgcagcacgtgctggacgagtacgtcgaggagaccggcagcgaatggggtcgtaacctcgccgaaaacctcgatgattacctgcgtcgtttctggctggtcaagcccaaggctgccaacctgaaatcgttgctttccagcatccgtgccaacccgcagtgatatgcgcctgaagagtttgatgaggttttaacatggctgaacgtctgaataacgacttccagttcatcgatgtcgggcgcaaagatccgaagaagaaactgttgcgtcaacgcaagaaagagttcgtggaaatctacgagcccttcaaaccccagcactcggccgaccaggcccaccgctgcctggggtgcggtaacccgtattgcgaatggaagtgcccggtgcacaacttcattcccaactggctcaagctggtggccgagggcaacatccttgccgctgccgagctgtcgcaccagaccaacaccctgccggaagtgtgcggccgggtgtgcccgcaggaccgtctgtgcgagggtgcctgcacccttaacgacggcttcggcgcggtgaccatcggttcggtggagaagtacatcaccgacaccgcgttcgccatgggctggcgcccggacatgtccaaggtcaagccgaccggcaagcgcgtcgcgatcatcggtgccggccctgccggcctgggctgtgccgacgtattggtgcgtggcggcgtgaccccggtggtgttcgacaagaacccggaaatcggcggcctgctgaccttcggcatccccgagttcaaactggaaaaaaccgtcctgagcaaccgtcgtgaagtgttcaccggcatgggtatcgagttccgtctcaataccgaaatcggcaaggacatcaccatggagcaactgctcgaagaatacgatgccgtgttcatgggcatgggcacctacacctacatgaagggcggttttgccggtgaggacctgccgggcgtgtacgacgcgctcgacttcctgatcgccaacgtcaaccgcaacctgggttttgaaaagtcgccggaagacttcgtcgacatgaaaggcaagaaggtcgtggtgctcggcggtggtgacaccgcgatggactgcaaccgcacctcgatccgccagggcgccaagtcggtgacctgtgcctatcgtcgtgacgaagccaacatgcccggctcgcgcaaagaggtgaagaacgccaaggaagaaggcgtgaaattcctctacaaccgccagccgatcgccattgtcggtgaagaccgcgtggaaggtgtgaaggtggtcgagacccgtctcggcgaaccggacgcccgtggccgtcgcagccccgaaccgatcccgggttccgaagagatcatcccggccgacgccgtggtcatcgccttcggcttccgcccaagcccggcgccgtggttcgagcagttccagatccagaccgacagccagggccgtgtcgtggctccggaacaaggccagtacaagcaccagaccagcaacccgaaaatcttcgcaggtggcgatatggtgcgcggttctgacctggtggtgacggcgatcttcgaagggcgtaatgccgccgaagggatcctggattacctgaacgtctaatctcgttcaagctgaaatgcggtcaaaaatgtgggaggggcggtgcgacgactcgacgcaccgcccctcccacatttatttttgcagcgctttcaagcccgcgacaaattgacccgatagacaaaaggcacggctcataccgtgccttttgcgtctggctctgagaaaatgcccgcactttttttgcggatgccgacatgactgccctcaagaacgaccgtttccttcgtgccctgctcaagcaacccgtggacgtcacccctgtgtggatgatgcgccaggccggtcgctacctgccggaataccgcgccagtcgcgccaacgccggcgatttcatgagcctgtgcatgaacccggagttcgcctgcgaagtcaccatgcagccgctggaccgctacccacaactggacgcggccatccttttttccgacatcctcaccattcctgatgccatggggcagggcctgtacttcgaaaccggcgaaggcccgcgtttcaagaaagtcgtcagcaccctggccgatatcgaagccctgccgattccagacccacacaaagacctcggttatgtgatggacgccgttagcaccatccgccgcgagcttaatggccgtgtgccgctgatcggcttctccggcagcccctggaccctggccacctacatggtcgaaggcggctcgtcgaaagacttccgcaagaccaaggctatgctctacgacaacccgcaagccatgcacttgctgctggacaagctggcgcagtcggtcacgtcctacctcaacggccagatcatggccggcgcccaggcggtgcagatcttcgacacctggggtggcaacctctcggcggcggcgtaccaggagttctccctggcctacatgcgcaagatcgtcagcggcctgatccgcgaacacgaagggcgcaaggtaccggtgatcctgttcactaaaggtggcggcctgtggctggaaagcattgccgacgccggtgctgacgccctgggcctggactggacctgcgacattggcgaagctcgccgtcgcgttggtggccaggtcgcgctgcaaggcaacatggacccgaccgtgctgtacgccaagccggaagcgatccgcaccgaagtcggccgcatactggccagctacggcaaaggcaccgggcatgtgttcaacctcggtcatgggattactccggaagtgaacccggagcacgctggcgcattcctgcgcgcggtgcatgagttgtcagcgcagtatcacgaataacacgcaaaacaaatgtgggagggggcttgccccctcccacatcaaagccagagaaactcaggccttcgcttgccccaacggcggcaacttcgccaacttcaacgccaccagcaacgcgccaatcaacaacgccacgataaacgcgccgatcccgttccacccggcgaagtgccagaagaacccgcctgccgttccggcaacactcgaccccacgtagtagcagaacagatacagcgatgacgcctgccccttggccttgaccgcgcgacggccgatccagctgctggccaccgaatgggcgccgaagaagccgaaggtgaagatcagcatgcccggcaccaccagccacagcgggctgaacagggtcagggccatgccggcgagcatcagcacgatggtgccccacagcacgcgacggcggccgaggcggtcggcgagggagccgattttcgccgagctgtagatgcccgagaggtacaccagcgacagcaggccgaccacggcctggctgaggtcatacggatcgcccagcaggcgatagccgatgtagttgaacatcgtcacgaacgcacccatcaacaggaaggcttcgaggaacagccagggcaggccggcgtccttgaagtgcatgacaaagccgtccaccaggctgcgcggcttgaggctggtggcgcggaagttgcgcgattcggggaggattttccagaataccgtggcggcgatcagcgccagggcaccgatgatcagcattgcggtgtgccaactgacgaagtcgatcaacacgccgatgatcaggcgcccgctcatgccgccgatggcgttgccgccgatgtacaggcccatggccaggccgatgtgctgcgggtggatctcttcgctcaggtaggtcatggccacggcggccaggccgctcagtgacaggcccaccagcgcgcgcatcagaaggatgccttcccaggttggcatcaggccgctggcgatggtggccagcgcggcgcagaacagcgcggagaccatcaccggcttgcgccccagccggtcggagatcggcccggtgatcagcaagccgaacgccagcatcgccgtggccaccgacaggatcaggctgctttgcgccgcattgatggaaaattcgagggacagcgccggcatcatcggctgcacgcaatacagcagcgcaaaggtggcgaaaccgccggagaacagtgccagcaccgtgcgcatgaacatcggcgtgcctttttcgatgtacgcgtcattgagctgggccaccacctcatccaaggcagtgggcggtacgtcttgagcgagtggagcgacagcagctttcacggggacctcggggaggaagagcctgccgggaccggcaatgcaaaaaagaatatagctcgctaatgattctttccaatatattgttcgacctgtttgatagctttaacgacctaatgaggtttgcatggaattgcgtcacttgcggtacttcatcgccgtcgccgaagaactgcatttcggccgggccgcgcaggtgctgggcatctcgcagccgccgttgagccagcagatccaggcgctggagcaagaggtcggggcacgcttgtttgagcggaccaatcgtcgggtcgagctgagcgaggccgggcggctgttcttgcaagaggcgcggttggtactggcgcaggtcgacaaggcggcggatgtggcgcggcgggcgcagttgggcgaactgggggagttgaagattggtttcacttcatcggcacccttcaactccagcattccccaggcgatctttgcgtttcgccaggcgttcccggcggtgcacctcaatcttcaggaaatgagcagcaccgaagtggctgagtcgctgatggatgagtcaatccaggtgggcctgatgcggccgctgccgttgccggattccttgagcgtggtcgagttgatgcgcgaacccttggtggcggtgttgaacgcggggcatccgttggtgcacggcagtgaacgtggtttgcacctggcgcaactggcggacgaaccgtttgtgtttttcccgcgcacctatggcagtggtctctatgcgcagttgctgaacctgtgccgtgacgcgggtttcagcccgcacttcgcccaggaggcgggtgaggcgatgaccatcatcggcctggttgcggcggggctgggggtatcggtgctgccggcgtcgtaccagcgcatacggatcgatggggtggtgtatcgcacgctgttggaccaggaagcgatgacggcggtgtggctggtacagcgcagaggtgtgcagacaccgatggcgaaggcgtttgtggagttgttgacgcgcaaggctgcccaataacctccggcaagcaagttgttgtggcgagcgagctttttgtggtgagcgggcttgtcccgcgctggagtgcgaagcgctcccaagatctttggggccgctacgcagcccagcgcgagcaagctcgctcaccacaacagcccgctcgccacaggtactgcgttagtcgtcaaatcggcactttgccacgggttgtcggaaggctgttttcaggcatactgccccaagttcccgaaaggggcttgtgagactctgaggatcctgggcaaccagccatcgcagagccaggcaggaagcggcgatgacaagccaacctgtttgtgaagagggcgccgaatggcgccctttgtcgtttctggagcagcgccggccttaattctgtttggagctgcccgtctgctcaaacagctgcgccgctgccccggtcccgtccgcgccgttgttgcgcaaccccgccatgatgtcgcgatccagcatgctcacccagcggttgtagttgcgatggatcttgccatccttgtagcccagttcgcggctatcgcggtaggtgatggcgtagctgttgcgggtgtagcggatgtcgatggcggcgtagtactggttacgcacattgatctcggcctgcaccagttgcgggctcaggcgttgtaccgtccattcgcgcttttgcagggcgttgacgatcaccattttcattttttcttcgctgacctgggcgttggccggcaggtcgtgctgggtgttgaggatcggcttgctggtgcaaccggcggtgaccagcagggccagggtgatcaaggtgacgcgtagcaaggaagacattccgttttctccaatcgattaaaaagtcaggaccagcggcggaagatcagcgaggtgttgacgccgccaaaggcaaagttgttgttcatcacgtagtcgtggtgcatctcgcggaactcaccttgcaggtaatccagctcgccgcattgcgggtctaccgaatccaggttgaaggtgtgcacgtactggtcgcggttcatcatctcgatgctgaaccacgactccaacgcgccacacgcgccgagggtatggccgaggaaactcttctgcgaactgatgggcatgcggctgccgaacaggctgctggtggccagggtttcagcgatgtcgccttggtccgtggcagtgccatgcccgttcacgtagccgatcgcggacggctcaagcccggcatcttccagggccagctccatggcgcggcgcatggttttctgctccgggcgggtggtgtgctggccgtcggcgttgctgccgaagccgacgatctcggcatggatatgcgcaccgcgcgccagggcatgttcgagttcctcgagtaccagcatgccgccgccttcgccgatcaccaggccatcgcggccgctgtcataggggcgtgggctggtttgcggggcgtcgtttttcaggctggtggcgtagagcgcgtcgaacaccatggcttcggtggggcacagctcttcggcgccgccggcgagcatcaacggcaggcggccgaacttgattgcctcgtaggcatagccgatgccctggctgccgctggtgcaggcgctggaagtgggaatgagtcgcccggtcaggccaaagaagatgctgatattcgccgccgtagtgtgcggcatcatgcgcacgtaggagttggcattcagcccctcggccaccgagttcagcagcatgttgccgaacgccttgatctcgtcggtgctgccggtagacgagccgcaggccacgcccatgcgcccgtccttgatggattcatcgccgagcaaaccggcgtcctgcaacgcctgttccgctgcccacaccgccaggcgcgaaacccggcccatgctgcgcaattgtttgcgcgtccaatgggcgggcacgacgaagtcgtcgatcggcccggccaggcgcgtgttcagttccgtaaagcggtcccactcgtccatacgccggatgccgctgcggttggcgcggaagttggccgaaatggttgcccaatcgctgcccagggaggtcatgccggccatgccggtgacgacaacgcgcttcatcagcacaaacctccattcacggccaggacctggcgcgtgatatagccggcttcggccgacatcaggaagttcaccgcaccagccacctcttccggcgtacccatgcgctgcgccgggatcattttcatcagctcttccaccggcacgttttcatccagcatcgccgtgtcgatcaagccgggagcgacgcagttgacggtgatcttgcgcttgcccagctcgatggccagggccttggccgcgccaatcagaccggctttggacgcgctgtagttgacctggccacggttaccgatcaaaccggaaaccgacgtgatgcacacgatacgcccagccgcgcgacgacgaatcatcggcatcatcaccgggtgcagcacgttgtagaaaccgtctaggttggtgcgcatcaccacgtcccagtcatcttccgacagggccgggaacgcgccgtcacgggtcaggccggcattgagcaccacgccgtaataggcgccgtgttgctccacatcggcctcgagaatttgcttgcacagcgcacgatccgccacgtcgaactgcagcacccgcgccttgcggcccagggcttcaacctcggcccgcaccgcatcggcctcggcgcgaccgctgcggcagtgcagcacgaggtcatggccggcctgggccaggcgcagtgcaatggcgcggccgatgccacggctggagccggtgaccagtacggattcagtcatggcgttacgtccttcgattcatctaaataattggccgcctggggcggtcgaaatacattcaagcgggcgctcgcctggataccgtcagcggtcaggtggcattcgaacacacccatcccattgtcgtcttccagtgaacgcaggccgtggatgctcagctcggcgcctgccggaaagtgctccacgttgcactcgaacttgcgcgtgccaagcaggaagcccagtgccaccgcttcgcctttctggcgcgcgtggcaaccggcgtaggcggcgacgctctgcgccatcaattcgatgccgacccaggccggcaggctgccgtcagcgcggttgaacaggccgcctggcttgaccgtggtgcgagtgtggatctgctcttcgtcgaacgacagcacctggtcgatcaggatcatgtcgcccgcatggggcagcagttcggcgagtggccaatcgatcatggggcctctccaataatcaggctgacattgttaccgccgaaggcaaacgagttgctcatcaggcagcgtttttccagggcctctgtggcttgcgcccagtgcaaggcgggcagtgccgggtcggcctggccgtcccagacatgcggtggcacccggtggtggaccaggctcaaccagcagaacgccgcttccagcgcaccggcagcacccagggtatgcccgctcatgggtttggtcgatgagcaaggcacgccgtgggggaacaggctggcgacggccaggctttccatcgcatcgttatgctgggtggcggtgccgtgcaggttcaggtagccgatctgctcgggctgcaatttcgcgctggtcagggccttgcgcatcgcctgcaacgcacctttgccggtgggttcgggcgcggagatatggtgtgcatcgcaactggcgccgctgcccagcagggcgatgggtgcgggcgccttgctcatcaggaacagcaccgctgcttcgccaatgttgatgccgttgcggttcaccgaaaacggattgcaacgctggttcgacaccgcttccaaggcactgaatccgttgagcgtgagcttgcacaggctgtcgacgccgccgcagatcaccgcgtcgcacatgcccaggtccagcaggcgctgggcgctcatcagtgcgcgggcgctggaggtgcaggcggtggagatcacataggccgggccgctcagttgaagccagtcggcgaggaaattcgccggggcgctgagttcctgctgctggtagtcgtagtcgccagggaactggtgttcgcgcaggtaatgggcaataccgcgactggcttcatcaatacccgaggtgctggtgccgagcacgatgccgacccgcgatgcgccgtagatgcggatcgcctggcggatctcgccctcgatctgcaacgctgcctccagcagcaactggttattgcggctgctctgctggcccaactcggtgggtatggttgccagctcgccgtgcacaccggccaccggcagcacacgttccgggacccagccgctttcggcgcgcatgccggagcagtcaccggcaaacaggcggcggctgacctcggcctggccacggccgagggcgcagatcacgccgagtgcgttgaggtaggcgctcatcgtgccgttcctagcggcgtgatgcggtagctcaagggctggccggtcatgttcacgctgaacacctcggacgactggtacacgatctgccaatggcccggcagcgtacgcgtcaaatccatcgcctgcgcgctggggtacagcgcacgcacgtcatccgccgaggtcagtgcaaacaacagcgcggcgaacagctcgcgtgcctggggattgggcggcagcaagccatcggcctgccactcgccatcgatcaacttttgccgggcctgggggatgcccagcgggtccatcatagaccagcgaatgccgctgccttcgcgctggatcaccagcagccagtcctggctctggccgtcagccaggcgttgcacatgcagttgcagcggcaaggccagggccgggattttcgcgggcaacggcgcctggctggcgcaggcccccagcagcaacaggcaaccgatcaacagccagcgcatcatgacgcggtactcgccaaaggcttgcgtgccacgcagttgaccaacgtttcttcgcgctggcccaccggcggtgccttgcgcagcccccagcgttccagcaggccgaagtcactggcgcggctccaccacaggtatgggtacgaaacgttttgcgggccaaactcaaagccttgttcgcggagcatctccaggtattcttcggcgcttttctgcacatgcatcgggtggcggaacagccagcggatcacccaggtatcgatataggcttcggtggactcggcaaacagcaagtaaccgcccggcttgagcacgcggtagaactccttgagtgcgcgatgctgctcaaccaggtgatggaaggtctggtggcagaacaggatgtccacgctgtcgtccggcacctgcagggtggcgcagtcactgccgatcagctcgatggccaagccttggcgcgccgcttcttcacggctcagttccaggctgtgcgggtccgcatccaggccgatcaggcgcgcaggggcgaatacctgctgcaacagcttgaaggatttgccctggccgcaaccggcgtccagcagcaccggtgcctggggcagcggctcggtgaacaggccgcgcaggtcattgatcgctacgcgcaacacatggtgctgccaggtgtggctgcgcaggaaccagaagccgaaccgggtttcctcgacgtagttcttactcaaatactgactgctcacgcggcatcccctgcacaaatttccgacaacatccgcaagcgtcgcttgggctcactcacaaacgggttgcgctcatcccacgcatagccggcgaggatcgacgcgatcatccggcgaatctccggcgagctgcccggatggaagatcacatcctggaacgtcccggcgtaccagccttcgacgtagcaacggaaggtatcgacaccgcgcttcaacggttcggcaaattcggtctgccagtcgacggtttcgccgttgagctgacgatgcagcacgccggctgccatgctcgccgaacgcatggcgatggtcacacccgaagagaacaccgggtcgaggaattccgctgcgttacccagcaaagcgaagcccggaccgtgcagggctttgacgttggccgcatagccgccgatggtccgcgccggcgtatcccagacggcgttttgcagcacgccggacaggctcggcgtttcatcgataaagccgcgcaggcaggcgtcgaggtcagcatcgcgaccgtcaaaatgcggcttggcggcgaccacgcccaccgagcagcggccgttgctgaacgggatggtccagaaccagatatcacgctgggtcgggtgtgtggtcaccaggatcttggtgcggtcgaagcccgggtgttcgatgcgatcttcgatgtgggtgaacaccgcctggcgcaccggaaagtccgacggcagatccagctccagcaggcgcggcaatacccggccgtagccgctggcatcgagcacaaacttagccttgaggtggtactcgctgccgttctcccggcgtacatgcaggtagcgcgactcgcccttgaagtccacgccgacgatggtttcgccgtagcggatatccacgccttgcttggcggcctgatcggccagcaacttgtcgaactcgccgcgctgcacctggaaggtggtcggtttgccgttgctgaaggtgtcgccgaaatcaaacgcgctgtagcgctcgccccacgcaaatgcggcgccggtcttcacctggaagcccgccgcctgcacggcgtcgagcatgccggcttcttcgatgaagtcgatgcagtgcgacagcaggctttcgccaatcgagaaccgtgggaaatgctggcgctcgatgatcaatacatcatgccctttgcgctttaacagcgcggcggcgatggccccggatggaccggcaccgatcaccaccacctggcgacgttccatttcaactgtgggcacgagggctccttgccacattggcgataatcacattcataaggcgtgcttctgtcgcccggcccagggcgccagcataaagctgaaggccaggcccaggctgactgataagccgaaattgctcaccgctggtgtactggacaccgccagcaggccaaacgacaaccaggtcgtcaacgctgccaacaaggtccccaagagactgaccgcaggaccgccgatttgctcgcgcatcaggatcgcgtagtcgacgctgatggccgtgaccagcagcaggccgaacaggctgaacagcgtcagcggctggcccagccagccgaggctggccaggctgcacagcgccgccagcaacggcagggcgacgatacgcaaggcaccgccgaagccgaacggcaggatcagcagcagcacgatcaatacgcaggacatcaacttcaattccgcggcgctgatctgggtgtcggcaaacactcggttcaagtcgcccaggcggtcgactaactgcacgccgggcagatccagcgcttgcacacgcagcagcgcggggttgttcaagccttgcaggctgaccatcgccgccacgccgccgtccgccggcccgagccacagcgtgcgccaaggttcggccagcgggcctttcagcgcggcgtcgatgtcttgtgtaggcagtgcttgcaactgggtgacttcggcttgcagggcactggcgggtacgccgaggtccagcagtggttgccagtgttgcggcagtgcgttcagcgcatcgcgcacttgttgctgttcggcgggcaggctgaccaactgattgagcgccagatagccctggagcttgtccatgttcaccaactgatcaaggcgttggcccagtgcgcgttgacgctccaacagttgctgctggttatctgcacgcaccaggaagaactggctggtaggctggaaaccggtgatgcgcgccacggcctgggcttcttgcagcaattgtggcggtgcgccgatccactggcggatatcgttcttgctgttcaagtgccacaggccaccgacgcaaaacagcagcaccagcgccagcaatgccgggctcggcacgcgcttgagcaacgactcgcgcaccagccacaggcattgcgcgacgcgcagcggccattgcgccgggcgcagttcgacgcccttgagcagcgctggcagcaggcacacggcggacaggtacgcaccgaccagacccgccgcggagaataccgcaatctgggtcagcgccgggaacggcgtccaggccagcgccaggtagccgatgcaactggtggccaggctcaggctcaagcccggcaaggtgatgcgcagcgccggccagctgcgccaggggctcatgctccagctcttcgacaggtaatgcagcgggtaatccaccgccacgccgatcaggctggagcccagcaccagcgtcatcacatgcatatggccgaacagcgccacacaggccaccgcgccaaacagcatacccaccagcaccggcacaaacgctagcaacacgcgccagcggcggaaggcgagcagcagcaacaacaggatgccgacggtagcgccgccgccgacccaggtgatctcccgcgtggcttgctgctgaccattggcggcgtacaacaaaccgctggcggcgagcaactgcgcgccttgctgaccggcttgcgcgcggctcgcctggagcaggtccgccacttgcagcggcagtttcatgtcgaaggcattgccggtggtgcgtgcccgcagcagcacccagcttttgccgtcggcatcggcgatcagcgcaccgctgccgatatccagctgcaccgaaccgtgttgcggctggctgttctggatacgtccggtcaggcccagccagtcatcctggctcggcaccaggctgaacccggtgaaagggtcgaacagcgcctgtacgcgttgctggacaaacgcatcgggatgctcgatcagttgctcgcggtccttggccgacagcatcgccaggcggccgcgcagcaattgctcacgcagcgccggcaagtcggcttgcaggttccattgcaccttctcaaacagcccgctggcctgccagcgctcgcccaactgttgcgccacggcgacggcttgctggcggtcggcatgccccaccagcaccagcatttcgcggttcagcggttcttgcatgcgttgttcggcttgctgttccagtgcatccggggtgttgcccggcaccagttccatcaggttggccgacagcggcgcgccgtgacgccattgccagccggccagggccagcacggccgccagcaggatcaggaacaggcgcggcagcaggcgctcactgggcaaagtcgtgttgctccgcgtcgctcaagggctgggctgcggtgctgtcctgcatgcgcagcacggtgctgtcgccctgggtttccagcagctcgattttttgcaccaactcgccaccgtcgatattgatctgggtgaagacttgttttaacagcagcgagcgtgggatcaacgtcagcttccagtcgttggcttcgcctttcaattgcagttcgaagtctcgctgcaaaccactgctgtcgccctgcagtacggcgaggaacagccgattttgctcggcaccggcgctcttgttcggcagcagttgccagccattggcatcgcgacgggcaatgccctgggcgctgatgcggtagtcctgttgtagtggggttttcagcagccacagcaggccatggtccttggcgagcacgaaggtgcctttgctgaccaatggctggggcagggcgcgcaggtgtttttcctgggtaaagttgccgtggatcaccgagggtttggccagttggtcgctgagttgctgcaaatcgaaagcgtgggcactgaaactcaggaacaacccgatcaaaaatgtgggagcgggcttgcccgcgatgagcctgagggcgctgcgtagtgtccggcggatcgcgttatcgttgaagtccatcgggggcaagccccctcccacatgggatttcatttcagggccctttcgacggcgtcggtgaagactttgggggaggccaactgcatctcgcggctggcaatctcaactgccacctgcacggtgctggcgcgggtcaaacgctcgccgctggccaaatcggtgatcaggtaattgaccttcaagcggttctcccactccaccaggctggcgcgtacgttgatggtctggccgaacacggcgccgcgcacgtagcgcagttgcaggtcgatcaccggccaggcgtagcccgattcgagcatcgccgtgtagttgtggccgagcttgtccagcaacgcgcaacgcgccacttcaaggtacttcacgtaatgcccgtgccacacgacgttcatggtgtcgacgtcaaaaaacggcacgaggatttcagtgtcgcaatgcaatacgccctggctacgcatgcagcctccaatgttgttcggcgatgcgttgcaggcacaggcgcagttcgccttccagggcgcggtcttcgatgaccggtgggaagtccttggccagctcttcatgcatcgccgccaaggcgggtggcagcggccgtgcatcctcggcctgggcccgcagccacacgccctggtttgcggcgagcagggtggcggcggcgacttgttcggtcagctccagcacgcggatcgcatcgcgggcggcgatggtgcccatgctgaccttgtcctggttgtggcactcggtggagcgcgagaacacgctggcgggcatggtgtttttcagggcttcggcggtccaggcgctggtgccgatctgcaccgccttgaagccgtggttgatcatggcgcgatcagccggcgcgccggacaggttgctcggcaggccgtggttgtaacgcacgtccaccagcagcgcgagctggcggtcgagcaggtcagcgacgttggccaccagggtcttgaggctgtccatggcgaaggcaatgtgcccgccgtagaagtgtccgccgtgcagcacgcgttcttcttcggcgtcgatgatcgggttgtcgttggcgctgttcagctcgatctcgatgaacgagcgcagccagttcaggctgtcggccagcacaccgaggacgtggggtgcgcaacgcagcgagtagcggtcttgcaggcgatgcagcggcgcggtgggcgcatcgatggccaggtccttgcgcagccaggcggcgacttgcatctgccccgggtgcggcttggcggcgaacaggcgctcgtcgaagtgttccgggttgccttgcagcgccaccacgttcaacgcggtgatgcgcgtggccagttgcagcaggtagtcggcgcgggcgaaggccaggcatgccaggccggtcatcacggcggtgccgttcatcagcgccagggcttccttggggcgcagcaccagcgggtcccagcccagttcgcggtgcacgtcggcggcctggcggcgctcgccacggaacatcacttcgcgttcaccggacagggttgcggccacgtaggacagcggcgtcaggtcgccgctggcgccgaccgagccttcttccgggatcagcggcagcacgtcgtgttcgaggaacgcgtgcaggcgctccagcaactctacgcgcacaccggacacgccgtggcacagcgactgcaaacgtgcggccagcaccgctcgggtggcctgggcgtcgagcagcttgcccaggccgcaaccgtggaaggtatacagatgacgcggcagcgcctcgacgtgctgcaagggcacggccaccacgcacgaatcgccgtagccggtggtcacgccgtagatcacgccttccttgtccagcagcgagtcgaggaactgcgcgcccttggcgatgcgctggcgataggcggcgtcatcctgcaactgcgtaggcgcctgacggttggccagggccagcacgtcttcgatgcgcaaagggcgttcgccaaaggttaccggctcaagatgcgtggtcatcggtcttccagaaagggtaaaagttgaaccattgttggggcgcttccaggcagaactggcccaggcgtgcggcgtagcgcgcggtccacagggctatgacctgctcgcgggtggtgcgtttccattcgatcaacggcgtaaacggctcgatgctcaggcgataacggctgccgtgcttgaggcacatcaacaggttcaccgggcatttgagcaggccggccagcagccacgggccttgggggaaggcggcgtcatggccgaggaagtccacacgcaccgtgcgcccgccgtgcagcggtacgcggtcgccggcaatggccagccactcgccatcgtccaggcgctggctgagcagcagcatggtggccgggtccagctcgctgacctggatcaggcgcaagtgcgtagccccggcctcgcccaacaggcggttgaattgttcggcgtgcttggtgtgcaccagcacgttcatggtgacttgctcaccgatctcggccagcgcgcggcacacttcgaggttgcccaggtgcgcgcccaccagcatctgcccgcgctcactgcgcagttgcccgcgcaattgcgccgggtcgttgatttcgatctgctccagacgcagcttgccgttccacacgtcgagcttgtcgagcaaggcgtcggcaaaggccatgaactggccgaagactttccagtggctggggcgcagttcgtcacgcccgctccagtcggccaggcgctgctggtactgccaggcgctctggcgcgcggtccggccgaacaggaagaagtacaggacgatgccgtacagcaccgggctcagcagtcgacgaccaaggaccttggcggcgaaggcggtgagtttcatcagccaatagctgccgcgttcctcgcggtcggcccagtgtttgctgctgtcgctcatgcctgccaccgtcgccacaggatcatcggtgcgcggatcagcatgccgaagaacaaccgggtgtgcatggccgagatgcgtacgttgtcgcggaacaggcggaagtgcgacagtccatcggccgggtaatgcacctgggtcggcagccagcgcatcggctggttgcgccaggccaggcgcaccaggatgtcggagtcgaagtccatgcgcgtgccgatgtaggccgagttcatcagcgccagcaccggtgccagcgggtacacgcgaaagccgcacatcgagtcgcggatctgcaacgacagggtgttgatccacacccacacgtgggtcaggtagcgcgcatacaaacggcccttgggcacgctgtcgtcgtattccgggtagccgcagatgattgcatcggggtgccggcgcgaggtgtcgataaaggtctcgacttcgcgcaggtcgtgctggccgtcggcgtcgacttgcagggcatggctgaaacccaggcgtgcggcttcgcggaagccggccatcactgcgccgcctttgccctggttgttgggcagggtcagcagggtgacgttttccagggtcgccagttgcgccaatacagccgcgcacgccgggctgctgccgtcatccaccagcaggcagggcaggccgctgtccagcaggctgcggaccacggccggtacggcggcttcgtggttgtagaccgggatcagggcgcaggggttatgcattggatgccaccaactgaatgcgtccgctggagcaggccgctacgccgttgcgataggcgaaatacaatttgccgcgttccgggtcaaagcgcaggtgcagttcgatcccgtcgcctgggcgcaccagttgctgaaacttgagcacttccatacccgcaaaactcggtggcaaatcgagcagttgctggcccaggttgaacgcccactcgacctgcaccacgcccggcagcaccggcgtgaccgggaagtggccgctgaagtaggccagatctggcggtacgctcagttgcacggtccattcgccattggcttcgacgcgctccaagacttccggtgccttgggccggggtgccagcaacagtgcctcgatgtcggcctgaggcagtttgccttggctgttcagcggtagctgtctcagtaaccgccaacgacgcggcagcgccagggcttcgcagtgctggctgaggtgttggcgcaaggtttgggtgacggttcggcggccttgattgcgcaacgcatgcaggccttcagcgctcaacaccaccagcgcaccgagtgaagcgcgattttcctggactacgcccagacgggtttcggcgacccacgggtgggccatcagcgcgtgttccagcatgggcagggaaatgcgtttttcttccagcttgacgatgcggtccaggcggccgagcagctcgaaacggccatcggcatggatgcgtgcggcgtcggcggtttgttcgacatgcccctcaggcaggtatggcgatgcaatgcgcagggcgccgtcggcatcttggctcagttgcacgtccgcaaacggctgccaaggctgtgcgccttggcgccaggcgatgccgccggtttccgagctgccgagaatctcggtcggccactgttgcaagcggtcgtacaggctgccggcggcgtccaccggcaatgcgccgccggacgaaaacacccgcgacacctggctcagcgccggccagtcgaggttatcgcccatgcgcttgagcagtgccgggctggcaacccaggcaaagtgcgcgtgctcgcggctggcgcgctgcatgtcttcagggaatgccagttgcctgcgcacaaaggtacggccggcgcacagcggccagagtacgcggaacagcaaaccgtagatgtgttgggtggcgacgctgccgatgatgcaggcgtccttgaggtcctggccccacagggtttccagggcctcgacctcgttggccagttggcgcagggtcttgtcgatgcgcttgggttcgccgctggagccggaggtgcacaggctcaggtggcaagtgtccaagtcaagtgcggcagcgctcagtggcgccgcatacagcgactcaaggtcaaccgcttcggtcagccaggcatcgacggcctcatcccagcgttggcgggtctgaggttgcaggtcggcgggcagcagtacgctgaccccggcccgccaggcacccagcagggcaatcgccagcaggcccgcgtcttcaaggtacacggccaggcgctggataccacgcgcttgcaggcctgcggccaggctcagggagtctgcccacagctgggcgtgattcatggcaggttcggtggtgaccggacgctgttccagcggctcaagcagcacgtgctcaagtttcaacccattcatacgcggcctcgaaccctttgtcgtaccagccattccacggcaaacaacagccccatcagcccgtaggcgatcaggccgttgtacaacgtccaccagctcagcggcgcccacagggtgagggcggcggcgagcaggccattacacagaaaaaatacactccacaccacggtgacctggcgggtatacacgatggcgtggggcggcaacaccgggtcggtcatgcgcgccaggcgctcgaccatcggcgggccatatttgaggctcaggccgaacaacgccaacatgaacccactgaccaggctcgggtaccagcgcagcaagtgcgggttgtcgaaccaggccagcaacaggcagaacacgatcaccgccagcgccatccagcggctgccggggcgtcgtgcaccggtcagcgcgcgcagcagccacaggccacccagcaacaggccgaactgccacggtgcgaagtgttcggtgccgtaatacaccgcgaaggggtacagcagccccgccagcaacaggccaaggccgatcagccggctcatgcggcaggcgtgaccagacggtacaccgcctcaaccacgtcgttcacggtgcgcacagccttgaattcctcggcggcgatcttcttgccggtctggcgcttgatatggtcgatcaagtcgacggcgtcgatgctgtcgatttccaggtcctggtacaggttggcgtcgagggtgacgcgttccggcggcagttcaaacagttccaccaaggcatcgcgcagggtgttgaaaatatcgtcacgagtttgcatggtccggtctcaagctgcctgtctggccgtgacgaacgccgcaaggctggccacgttggtgaagtgattgcgggtgtccttggcatcggcatcgatcttgatgccgtactttttctggatcgccaggcccagttccagggcgtctaccgaatccaggccgaggccttcgccgaacagggtctgctcgctgccgatgtcgtcgacgctgatgtcttccaggcccagggcctcgatgatcagcgcctttatgtcgtgctcaaggcggtgttggtcgctcatcttcggcgagctccttaataaaatagtgatgcaggtaatcgttgagcttgcgtgaggcctggggcgctggccccagtgttgcgaacgcctgtggttctatatcggcacccacccgcaaactgaagtgcacgcggcatttcgggatgcgataccagggttcggccttggtcagcgtggtcgggctgaccttgatcaccacgggggtgatgattgtcgcaccccgcagtgcaatggcggcaccgccgcgatgaaaggcaggcgccgcgccgggtgtggtgcgggtgccctcgggaaagatgatcagggtctggccactgcgcagggcgtctgcggcggcatcgagcatctcggcactgccgtcgttgctgatataaccggcgtcgcgcaccgggccgcgggtgaacgggttctgccacaggctctgcttgaccacgcaattggcctggcgcaccaggccgatcaggaacaccacatcgatcagcgacgggtggttggcgatgatcatctggccagggcggccgagtttttcggcgccttcgacgctgtaggtcagcacgccggcgcgttgcatcaggcggataaagaaccagaacagccaactgatcgtgtggcgggctcggctgcggtgtcttgcagcgctgcctggcaggcaactgagcaacggaaacaccagcaaacgcaggcacagcccgccgaagccgaacagcgcaaagctggcggcggtggcgaacagacgccagtaataggcgtcccgtggtttgtcattcagggcttgcgttgccagttccatacgcggttcttccaggcatgttggcaggcgacctgttcggtgagcagggtgcgcagcaggttcagggcgtggggccactgggtttgagtgtgttggacagtgccgctgttcagttccaactgccactcgtcgcccggcgtcagcagcagaccgagggcgtatgggaagggtacgtcaacgatccagctggcataggcttcgggcggctgctcctcggtaatcaccagtaaaaccgctggcgcgccctcgttgagcagcgcggcggcttcgagcatgccgtgctccaggccatcgccggcggcggcgagggcggtcatttcgctggtttcattgcgcaggatcgaccaaaggccaattaccgcgttgtgcaccgacaggctgaactgggtcggcgacagcggctgctcgctggccaggtcgctgaggatgtcgagggtgcgcggggtctcgccatgccgggaaataaacaccagcggcaggtcctgcaggccttcggccaacggccaacccacgctgaacgccatgcgtgccagcctgctcaggcggcggcgctgcatggccggcaggaacgagacgtcaggggctgcatcacttgcgggcagcaacgccggcgcctgacaccaggcgcgccagtcgtccacgctatcgagcccgggggcccaggcgcgccattgggcgatgttgaaagtgatcactgagaagttatcccgcccctgcgggcttccatgtgcggctgttggccccgaataccgggacagggaacaatagccgaatggcgcgcattatcccggtgccgtggggttctagcaaactttggtaaagatttgtgcacggtcgattacaaaatagtggaaagaatttacagattgtcctttacccaggggctggctggattgtcggaccgttctttttaatctgtgggctgtgtatgacagtcatcgcgccaatggcatggtgatgcagcagtgcatggattaacgaggtagctaacaggcgcttttgccctctacactcggacattcattgatacacggaggtttttccatgcggcgtgtggtgttcaatcaaaaaggcggcgttggcaagtccagcatcgcctgcaacctggcggcagtcagcgccagcgaaggttatcgaaccctgttggtggacctcgatgcgcaagccaactcaacccaatacctcactgggttgaccggcgacgatatacccatgggcattgccgaattcttcaagcaaaccctgtcttccgggccgttttcgaagaaaaaccgggtggatatctacgagacgcccttcgacaacctgcacgtgatcaccgcaaccgcagaactggcggacctgcagcccaagctcgaagccaagcacaagatcaacaagctgcgaaagctgctggatgagctgagcgaagattacgaccggatttacctggatacgcctccagcactgaatttttatgcggtttcggcgctgattgccgctgatcgcgtgttgatccccttcgattgcgacagcttctcgcgccaggcgttgtatggcctgctggctgaaatcgaagagctgaaggaagaccacaacgaagggttggaagtggaaggcatcgtggtcaaccagttccaggcccgggcgagcctgccgcagcagatgctggatgagctgattgcagaaggcttgccggtattgccggtgtacctggccagttccgtgcgcatgcgcgagtcgcaccaggagagcaagccgctgatccacctggacccacggcacaagctgacgcagcagtttgtagagttgcataacctgctggaaaacgcgtaacgaagattcaatgtgggagggggcttgcccccgatgacggagagccggtcgacacctatgtgactgatacaccgctatcgggggcaagccccctcccacattggccggcgacgcttttgaaatttaggttagatgccttggctacgtaaccagctcatcaactgcggcaacgcaaacgccccactctggcgcgccacttcgcggccgttcttgaacagaatcaaactggggatcgagcgaatccccaactgtgccgacaactgctgattggcctcgctgtccagcttggccaaccgacacttgcccgccaactgcccagccgcctgttcgaacaccggtgcaaacgatttacacggcccacaccagtcggcccatacatccaccagcaacggcaggtcgcctttgatctggctggcgtagtcgccttgtttcagctcaaacggcttgttcaacaaaaccggctgcttgcagcgcccgcactttggcgcatcacccaggcgttcaccggggatgcggttgaggccgttgcagtgagggcagggtatgacgaggggttcggacattgagggctcctagaatgtggtcgatggatcctacttggagccagggccggtatttatcaagacagcagcatcattgtggcgagcgggcttgccccgcgttgggctgcgtcgcagcccccaagatggttgcgcgatttcgggtgactaatcagggccgcttcgcgccccaacgcggggcaaggccgctcgccacaatggagggcatcgttcttacgatcttaggaagaacaactaatctccaaatgctttccccaatccggcggccgctgtgcgtattgctccatccccgcttgctcctcaaacggcctggaaagcacttcatgcagccgtcgcacctcgctgtaatccccagattcggcggcaacgatggcgttctgcgccaggtagttgcgcaggatatacagcgggttcaccgcatgcatccgcgctcggcgctgttcttcgctgtattccccatcccgctcaacgcgcgccttgtactgctcggcccaggcatcaaacccggccaggtcgacaaagtcatcgcgcaaccgtgccacggccaacgccgccgactcatcccccaggcggcggaagaacagcgtgtaatccacgccgctgttctgcatcagcttcaacaaccgctcgaccagctgctggtcatcgtcttcggcggtggtcagccccaggcggcggcgcatcaggtccaggtagttcgcctggtacagcggcagatacagccccagtgcttccttcaatgcatcgacgctgataaacggtgtcagcgcctgggccaatgcactcaagttccactgcccgatcggcacctgattgctgaaggaatagcgcccttcgtgatccgagtggttgcaaatgaagtgcgcgtcaaagtcgtccaggaacgcaaacggcccgaagtcgaaggtgatgcccaggatcgacatgttgtcggtgttcatcaccccatggcagaagccgtaagcctgccatttggcgatcagctcggcattgcgctcgacgatttggcggaacatcgccaggtacggctcgggctgttcgcggcactcggggtagtgcaggttcaatacgtgctcggccagttgcgcctgctgctcgggcttcttggtgtagtagaaatactcgaaatgcccgaagcggatatggctgggcgccatgcgcaacaccatcgcgccgcgttcctgtttttcgcgccacaccggggtgtcggaaccgatcacgcacagcgcgcggctgctggggatgcccagcgcgtgcagtgcttcggacgccagaaactcgcggatcgacgagcgcaacaccgcgcggccatcacccatgcgtgagtaaggcgtcatgccggcgcccttgaggtgcaggtcccaatgctcacctgcctggttgtacacctcgcccagcagcaacccacggccatcgcccagttgcggggtgtaaccgccgaactgatgcccggaatagaccatcgcccgcggctctgcctcggcccacagtttgtgcccgccgaacagttcggcgaacaccggtgtttcggcaacggcggggtccaggtcgagcagggccatggcggcctcgctcgccacgaccaggcgcggtacgtcgaggggctcgggcaatacgtgagttgagaacgcatcgcccaggcgtgcgaagcgattgtcgaaggtcagttcgtcgagggctttcaccggccatctccagcagaatgtccgagcattctgctggggatagcgcggttagtcgagtttgctcggcggtggttcctgcacgccgccgtcgttggcgggcttggccggggtgtcgacttccaccagtttgtattcctggccgtggaggttcttgagatagacctccatctggcggaacgagatgttgatgtgctctttcttgaactcgcgattgataaagcggttcacttcgtcgatcaccgggttgcggtcgcccaggtcgcgcacgtgcatgcgcagctcgtggtcgagggtgctttcgccgaagttgaggaagtacacatggggctccgggtccttgagtacccgggggttgtcgcgggcggccttgagcagcagttccttcacgcggtccaggtcggagccgtagtccacaccgagcttgagggtgacgcgggtgatggtgtcggtcagcgaccagttgatcaactggccggtgatgaaggttttgttcgggacaatgatgtccttgcggtcaaagtcggtgatcgtggtggcgcggatgcggatcttgctcaccgtgcccgacaggttgccgatggtgatggtgtcgccgatgcgcaccgggcgttcgaacaggatcatgatgccggagatgaagttggcgaagatctcctgcataccaaagcccaagcccaccgacagcgccgccaccagccattgcaacttgtcccagctcacgccgagggtcgacagggtggagacgaaaccgacgccggcaattacataggacagcagcgtggtggtcgcgtaggcgctgccctgggccaggtccagtttggacagcaccaatacttcgagcaaacccggcaagttgcgcgcgagcgcgaaggtgatgccgatgatgatcagcgcgccgagcaagtcgccgatgctgataggcaccatgctgatattggccccggtgccgctggtgtattcgtacagcgtgacgttatccaggtaggaaaataccgagatcaggtccgaccacacccaatacagcgcggcgataaagccaccgagcaaggccaggcgtatcaggcgcatggactgctcgttgacctgctcgatgtccagggtcggttcttcgatcaccgcttcgccgtcaccggcttccttggcggcctggcgtttggccagggctcgcgcataggccaggcgccgggcggcaacgcccaggccacggacgaaggtggcttcgatcaccagccagaacatcagcaggtacagggtgttgatcagccggtcgctgagcttgagtgcggtgtagtagtagccgaagcacacagcgatgaacaatgcgatgggcaacgcagtgaacagcaggcccacggctttgcggaacagcgaggctttttcatgggtcgggctgtgcaacagcaggcggcccagcagccaggccatcagcgcgtagcaggtcagcaccacgccgatgcccagcacatcgtcagccagcgccgccggttggtgctcggcaatcgccaccacggccaccagtgccagtaccaccagcccgagtttgcgcacccagccttgcaggaattcgacctggggtttctcccagcggaagtgcagttcagccacgccacccggcgccaggatgcgataggcggtgtagaacaccagccaggcctgggcgatctgcagcagggccgaaccgaggttggcgttttgcccacgggcgtcgatttgcagcgcgtagccgcacagcgccaggccgagggacaccggcattgccagcaggatgttgatcaggatggcctggggcgtgtgccactggctgtcgcgcttgaagtggccgatgtccaggtgcaccttgctcaagcgttgatacagatttttacgccgccacagcaacgcgccgatcaacagcagcaacggcaggaacagcaacgggcgctgggtcaggccgtcatacagctcgctgacgctggaggcccagggcagggtggcaacttgcttgctcaggtgcgcgggaacggtttccagccattcggtatccagcggcttgttgctgggaatccagaacatctgctcatccagcgtcgcccgcagggtggtggcggtgctgagcagttgtttctggttcagttgcagggtgatggattcgttgagcagcgcgctcagctcacggctcaggcgctccagcaggtcgctgcgggtgatcgccagttccagcagggtgcggcgcagttgcggggtgacgtcttccggcgcctggttggccagcaggttatccacataggcgctgggcgagctgatcagctcgcgctgttggttgacctcgaactggtacaggcgaatgttggcgatgtcgtccgccaggtcgcggtccacggtgaggcgcggcagggcctgcttttgcttgtagaggatcttcgacagcagcaggctgcccttgagcacgttgatctgctcgtccagggccgagtcgctctgggtcacggtgtccagttgctgcttggtctgcaagttcttctgggtcaggtcgttgaggcggtcggtacttttgagcaggtagtcggacagcttcaggttcgccgcgctttccgtggccagcaggctgctgccaccggccttttgcgcttcgatggactgctgggtcacggtctgctgggactgggccaggcgtttctggttgatcagggtttgcaggtcctggatctcttgttccaggcgcgcggtcttttccatcaccagatcgtgctggctgttgcccaggtcttgcagttggctgttgccggccagttcctggcggcgcagggggatcagcgcattgagcgccgcgagttcagcgttgagctggttacgctggtcggcgctgagggtcttgccgttgtctttgccggccttgagcgtcgaattgatctgcaggatgcgcgtctggctgttgctgatttcggtctgggcgcgctcaggacgggtctgggcggcgatggacaggctgttggcgtccgccagttccttttgcaggtcgccttgctgggtgctgcgctgcaccagcaattgctcaagctgcggcaccggcaggctggcgtagcgctgggcgaccgggatgactttggtggccttgagccgggccagttcgcgctggttgtcggcggtctcgcgcggggcgtcttccagttggcgcttgaggtcgaccaggcgctgctcgtaatcctgcttgttgcccaggtatgtcagggtctgctgcaggatggtctgcaacgccttcatgtcggcgtcgggcagcttgcggtcgggcagcttgtccagggtttgctggatagactcggcgctgggcgggtcggcggcgtggacgacgctgacacacagggtcaggctcagcagggcagtggcgagaagagtgcgcaaggttggcatagagaccggtcgtgcaaggtgaagaatcgggggcgtcgtcgccccgcagtttagaggaagagtccggggcccgggcgacttccttcggggaatctgacgcccactttgccgatcttgttcccgtccatgaccgcgacggtccagatggtgttgttccactccacctggtcgccgacgatgggcgcgcccccgactttctgggtgatgaagctgctcagcggcatgtccgggtcgataccctccagcttcaggccgtacagggccgacactgcgcccaattgggcgtcgccttccagcacgaagtcgccgaagaagcgcaaatccagaccgcgttgcggcgcctggctgaacagtttgcctagggccggcaggttgtgttcgtggccgatcacgcagagtaaatcgccgacttccagcacggtactacccgacggatggagcagttgctggccacggaacagcgcggcaatccgcgtgccttcgggcattttcagctcgcgcagggcggcgccgatgcaccatttttccgcgcccaggcggtagacgaacagctcccactcgctggtgacgtgcacttccagggctgcacgggaaatcggcgccgggtccggcgggacggtgaccttgagcagcttggccacccacggcaggctcgtgccctgcaccagcagcgacaccagcacgataaagaacgccaggttgaagtacagctgcgcatggggcaggccggccatcagcgggaacaccgccagaatgatcggtaccgcgccgcgcaaacccacccaggcgataaaggctttttcgcggccatggaacgccttgaagggcagcaggccgaccatcaccgacagcggccgtgcaaacaggatcatccacagcgccaggcccagggccggcagggcaatcggcaacaagtcatggggcgtgaccagcaggcccagcaccaggaacatgccgatctgcgccagccaggccatgccatcgagcatatgcaaaatgccatgacggctgcgcaccgggcggttgccgatcaccaggccgcacaggtacacggcgaggaagccgctgccgtgcagggcgttggtcacggcaaatacgaacaggccgccggcgatcaccaggatcggatacaggccggtggccagattgatgcggttgaccatttgcagcatcaaccagccgccgcccaggccgacgatgccaccgatgccgaattcgcgcaccaggtgggtcagcaggctccagtgcaggccggtctggccgctggcgagcatgtcgatcagggtgacggtgaggaacaccgccatcgggtcgttgctgccggattcgatttccaggctggcggtgacccgttcgttcaggcctttgccgccgagcagcgagaacaccgctgcggcgtccgtggagccgacaatcgcgccaatcagcaggccttggatgatattgagatcaaacagccaggccgccgccatgccggtgaggccggtggtaatcaacacccccaccgtggccagcgacaacgccggccagagtgccacgcggaaactcgccacccgtgtgcgcaaaccgccatcgagcaggattacggccaaggcgaggttgcccaccaggtaggcggttgggtagttatcgaagatgatgccgccgccatcgacgccggcgaccatgcccacggccaggatgatcaccaggatcgggatccccaggcgggacgaaagagaactcaccagaatgctcgcacttaccagcaacgcgccgatcaggaacaggctgttgatggtcgtcgcattcaaaggcagtactccatgggcaaacaagacggggcgcaaactgaccatgcagtctgcgtgccagcgattctaacctgttgaattgctgcgctgtcaaaaagcttttaaagacaggcgtagatctaaatgtgggagggggcttgcccccgatggcggcctgtcagccaacttatctgtagctgaaccatcgcaatcgggggcaagccccctcctacattatttgaatcaggtgtgtcagttagaggcggaagcggccgaccatgccgttcaagtccaccgccaggcgcgacagctcgctgctcgccgcactggtctggctggcgccagtggctgactgcaccgacaaatcacggatgttcaccaggttgcggtccacttcccgcgccacttgcgcctgctcttccgccgcgctggcgatcaccaggttgcgctcgttgatctccacaatcgcggtattgatggtatccagcgacattccggcgcctttggcgatgttcagcgtcgattcggcgcgttcggtgctgttgcgcatcgaatccaccgcgtgctcggtgccggcctggatactgccgatcatccgctcgatttcgctggtcgactgttgggtgcgatgggccaatgcccgcacttcatcggccactacagcaaaaccgcgaccggcctcaccggcgcgcgccgcttcaatcgccgcgttcagcgccagcaggttggtctggtcagccaggccacggatcacgtcgagcaccttgccgatatcgcgggactcattggccaggtcgccaatcagggtcgcggtggcttgcacgtcaccgctcatgcgttcgatggcgctgacggtttcctgtaccaggtcacggccatcaccggcggaagtggtggcgttgcgcgacgcttcggaggtgctcaccgcattgcgggccacttcttcgacggcgctggtcatctcattcaccgccgtggcggcttgttcgatttcgttgttttgctgggtcaggccacgggcgctttcgtcggtaaccgcgttcaactcttcggcggccgaggccaactgggtggcggagccggcgatgcgttgcagggtgtcacgcagtttgtcctgcatcttggccatggccgccagcaggcgcccggcttcgtcgttgccgtcgaccttgatcgggcgggtcaggttgccttcggccacttcttccgcggcttccaacgcctgggaaatgggtagggtgatgctgcgggtcagcagccaggcgaacaacagggtcagcagggtggcgaccgccaacaggcttaccaccaagttgaaggccatgttgtattggtcctcggcttccttattggtctccagggccatcttgttgttgaggtccagcaggcgcgtgagcacggcgttgacctgttcggagttgctcagcagttcggtgttgagcaggctgcgcaattcttccacctggttggcccgcgacaggctcttcatgcgctcttcaatctggtggtactggccgagcaggcgaacgtattcgtcgtaggtcgagcgttcttcagggctttcgatgagtttttcgtagatgccctgggcggtgcggatctgctggttgcgcagttcgaaggcttccagggtcttttgctgcacgtccggctcgcggttggtcagcaggcggtacgacagcacccgcagccgcagggtcagttgggtgaactcatccagggcgcgaatgctcggcacgctggacagggtgatgtcttcggtggcgccgcggatcttgctcatctggttcagcgcgaacacaccgagaaacaacatcagcgcaccaataaacgcgaagccgaggaaggccctcggagcgatattcatattacgaagcgacatgcgggaatcctgggggagagcgcgatccatgcggccatgaaacggagtgtccctctctatcggtcgtacgactaaagtctaaagggcgctgtgcgtttttgtcgcacctgacgaggggtttgctcgattcaggaaccagatcgggtaaatgcagtcactaaggctcgaaagtgcggcccggcccttaaaaatcgggctgcgcgccggggataaccctggcatccgaggtgaattttctttatcgtcaccgccctttgaaaaagcccgagaaatcaaaatgttagaagcatccctcagccaattggaacaactggtcagtgacctcgtacagcagaatcaggacctgctgggcagcaacgaatccctcaaggccgaactggcccgcgccaaggatgataacgacagcctgcaactgagcctgatggaacaggaagagaagcacggtgccactgccgcgcgtatccaggcgctggttgagcgtgtgagtgcagggcctgtcagcgcatgagtgaagggataaaggtcgtttcgattctcggagaggattactcgatcaaggccccgcctggggaagataaaaccctgatgcacgccgtgaccctgctcaaggcctccctggccaccaccaagaaaaagtacccgaccctgatcggtgacaaattactggtgctggcggctctgaacctgtgcgccgagcagatcgaaatgcagcaggctcaccagcaggaactcgaccgttaccaagagcaagtcagcgccacggtcgatgtgatttccaaggcgatcggaacgccttagaaccactcatcctgcatcccgaggcacgtatcatcgcgtgcctccagaatcgccagttcatgatggcagcccggtacttcccaggtcaggaagtaccgggcggcctggagcttgcctttatagaaggccacatcggccgcgttgcccttggccaagccttcttcggcacgaatggcctgttccagccagcgccagccaatcaccgtatgcccgaacaccttcaagtacagcgccgaattcgccaggctgctgttgaccttgccctgggcgagatccgtcagcaggccgatggtcacgctttgcaggcggtttaccaactgctccaacggttcccttagcgcagtgaggcttgggtattgctgcgcacgggcgccggtttcggcgatcagccggatgagttgcttcaagcccgcgccgccattctgtgccagcttgcgtccgagcaaatccagggactgaatgccatgggtgccttcatggatcgggttcaggcggttatcgcggtagtactgctccaccgggtattcacgggtgtagccgtggccgccgagaatctggatcgccagttcgttggccttgaggcagaactccgacggccaggatttgacgatgggggtcagcaggtccagcagttcgtgggcctgtttgcgcgcgtcttcggtttccagggtggtggtgtcgtcgaacaggcgtgcggcgtagaggcccaggtcgaaggcgccttccacgtaggacttttgcgtcagcagcatgcgcttgatgtcggcgtgctggatgatcgagaccggtgcagtcgtgggatccttgctgtccggcaggcgaccttgagggcgctcgcgggcgtactccagggaatagaggtaaccggcgtaaccgagcatcaccgcccccatgccgacgccaatacgcgcctcgttcatcatctggaacatgcaactcaatccctggtgcggtttgcccaccagatagccgacacagttgccgttatcgccgaaattcaacgccgtggaggtggtaccgcgccagcccatcttgtggaacagcccggcaagcaacacatcgttgcgctcgcccaggctgccatcgtcgttgaccaggaacttgggcacgataaacagcgaaatgcccttcactcccgcgggcgcgtccggcagcttggccagcaccatgtgcacgatgttttctgacagcgggtggtcgccgccggagatgaagattttgttgcccttgagtcgataggtaccgtcagccgctggctctgcgcgggtacgaatatccgacagcgatgagccggcgtggggttcggtgagtgccatggtgccgaagaaacggccatcgatcatcggttgcaaaaagcgttgcttctgatcgtcggtgccaaagctttcgatcaggttggcggcacccatggtcaggaacgggtaggaggtggacgccgcgttcgccgattggaagtgcgcgaaacaggcttgtgaaagcagtgtgggcagttgcatgccaccggcgtcgaaactgcgtgcggcgttgaggaagcccgcttcgaggaacgcatccaccgccggtttgacctccggaatcaggatggccttgccgtcttcgtagcgcggttcgttctcgtcgttcttgcggttgtggggggcgaagtatttttccgcaatgctgcgggcggtgctgatggccgcatcgaaggtttcgcgattgtgctcggcaaaccgctcgcgctgggtcaggccctcggcatcgaggacttcatacagctcgaaagccagattacgggaactgagtagcgtctcggacatggcggattacctatggaggagtttgcctgagtctaagtgcgcgaatagaggctggatagcaagattgatttgggtgatgcacaggcaaatgtgggagggggcttgcccccggtggcgatgtgtcagtcaccaagtgcattggccgatccaccgctatcgggagcaagccccctcccacattttttaccgcatttcgtcaggcagttagccgatggtcatcaggctggcgttaccgcccgccgcagcagtgttaacactcaacgcccgttcgatcaccaaccgctccagcgcaatcgccgtctcgccctgggacaaaccatgcaccccgacaatcgcgccaccacgctgcgccacttgctggcacaccgcacgcaactggtcggaatcgccgtggtgcagaactgcgtcgaataccacttcgtccttggtccagtcagccacgcgcttgatcttcgcctgaatctccttcggcaggcgtgggaacaaggccttggtctggtcggtttccggccataccgccgaaccacctacggccagcactgccgccagttgcgtcaacagatcagcttccacgtccgccaggcacagtacgtgctcgcggggcaggatggcgtagctgttgcgctcgccggtcgggccggccagttggcgggtgataccgctttgcgattgcgcggcgaactggcggcacaaggcgctcaggtcgctggactgattgctgtcggcccaggttttgagggcggtcagcggttggctcatggcatcgcgcaaacgaacatccggtgcggccagtgcgtcgccgcgtacgaaggattgctcgatggcatccgtaggacgggtcgacagcaggcggtacaggtacagcgggccgccggctttcgggccagtgcccgacaggccttcgccgccgaacggttgcacgccaaccacggcgccgacgatgttgcggttcacatagacgttaccggcatggacgttgtcgatcaccttggcgatggtctcgtcgatgcgggtgtgcacgcccagggtcaggccatagccggaagcgttgatctggccgatgagctggtcgatctctttgcgcttgtagcgcaccacgtgcagcaccggaccaaagatctcgcgttgcagttcgtcgaagctttccagctcgatcagggttggcatcacgaaggtgccgcgcttgatctcttcaccatcggcaatcgccacctggtacacattgcggcctttgtcgcgcatggcctggatgtgtttctcgatgccggccttggcttcggcgtcgatcaccgggccgatatccaccgacagacgctccgggttgcccaggcggcattccgccatggcccccttgagcatttcgatcacgcggtctgccgaatcttcctgcaggcacagtacacgcagggccgagcaacgctggccggcgctgtcgaaggccgacgaaaccacgtcgatcacgacttgttcggtcagtgccgaggagtcgacgatcatcgcgttctggccgccggtttcggcgatcagcgggatcggacggccctgggcatccaggcgtccggcgacgttgcgttgcagcaggcgcgccacttcggtggagccggtgaacatcacgcctttgacgcgatcatcacccaccaggcgggcaccgacggtttcaccctggcctggcagcagttgcagcacgccttgcggaatgccggcttccagcaagatgcgcacagcttgtgcagcgaccagcggggtttgctcggcgggcttggccagcaccgggttaccagcggcgagcgcggcggcgacctgaccgctgaaaatcgccaacgggaagttccacgggctgatgcagaccaccgggcccagtggacggtgggcgtcattggtgaagtcgttgcgtgcctgcaccgcgtagtagcgcaggaagtccacggcttcacgcacttcggcgatggcgttggcgaaggtcttgcctgcctcgcgggccagcaggcccatcagtggctggatctcgccttccatcaggtcggcggcgcgctccaggatggcggcgcgctcggcgggcggggtggcctgccagatcggaccggcactgatggcgcattggatcgcgttgtcgacgtcttcgacagtggcttcttgcacatgaccgactacatcgcgcaggtcggacgggttgagcaccggcgccgcggcttgctcgctggaggtgcaaccgagcatcggtgcggctttccagttgttgtgagcggtggccagcagcgcgcaggacagcgatgccaggcgatgttcgttggccaggtcgataccggccgagttggcgcggtcgctgccgtacaggtcgcgcggcaatggaatacgcgggtgcggcaggccgaagccgccttccagcgtggccatttgctcgatgctggccactggatcggccaccagctcctggatcgagatggattggtcggcgatgcggttgacgaacgaggtgttcgcgccgttttccagcaggcgacggaccaggtaggccagcagcgtttcatgggtgccgaccggtgcatacacacggcacgggcggttcagcttgccatcggcaaccttgcccaccacctgctcgtacagcggttcacccatgccgtgcaggcactggaactcgtactggccggggtaatagttctgaccggcgatatggtagatggccgacagtgtgtgggcgttgtgcgtggcgaactgcgggtagatgacttccggcaccgacagcagtttgcgtgcgcaggcaatgtaggaaacgtcggtgtacaccttgcgggtgtacaccgggtagccttccaggccttcgacctgggcgcgcttgatttcgctgtcccagtacgcgccttttaccaggcggatcatcaggcggtggcggctgcggcgcgccaggtcgatgacgtagtcgatcacatacgggcaacgcttctggtaggcctggatcacgaaaccgatgccgttccagccggtcagttgtggctcgaagcacaggcgctcgagcaggtccagggacagctccaggcggtcggcttcttcggcgtcgatgttcaaaccgatgtcgtattgcttggccagcagggtcagggacagcaggcgcgggtacagctcgtccatcacgcgctcatactgcgcacggctgtagcgcgggtgcagcgccgacagcttgatggaaatgcccgggccttcataaatcccacggccgtgggaggctttgccgatggagtgaatggcttgttcgtacgaggccaggtacttctgcgcatcgtgttcagtcagcgcggcttcaccgagcatgtcgtaggaatagcggaagcccttggcttcgaacttgctcgcgttggccagggcctcggcgatggtttcaccggtgacgaactgctcgcccatcaggcgcatggccatgtcgacgcccttgcggatcatcggctcgccgctcttgccgatgatgcggctcagggacgaggtgaggccggcttcgttgtgggtggcgaccagtttgccggtcagcagcaggccccaggtggcggcgttgacgaacagcgacgggctgttgcccaagtgcggctgccagttgccggtgctgatcttgtcgcggatcagtgcgtcgcgggtgcctttgtccgggatgcgcagcagcgcttcggccaggcacatcagcgccacgccttcctgggacgacagggaaaactcttgcagcaggccctgaacaatcccggcacggccaccggcactcttctggttacgcagtttttcggcaatcgaggcagccagcttgttggtggcttcggccatcggcgccggcaggcgggcctgttcgatcagcatcggcaccacttccggctcggggcgacggtaagcagcagtgatcgacgcgcgcagcacggattgcggcaggatgctttcggcgaattcaaggaagcactggtgggcgtggtcggtctggacctcgccagcgtcgtcagcgtccttgctgctcaaaccattgagttcggtcagggttgcaccaccctccagcttctccaggtaattgaaaattgcctgcttgatcagccagtgcggcgtgcgatcaatggaggtcgcggcggccttgaggcgctcgcgggttgggtcgtcaagtttgaccccaagggtggtcgtagccattttcttatcctcatgggtgccactaccgagtggcatcagctggcggcaagattagctttgcgcatgcagaggtgcaaccgggtgcaacccattttcttcatgatttttttgatcgtggtcgggaaaaaattcggccttcgacggaatccgcttcgccttggtgcgtttgcttctgagatcggctgttcttgctccgaaaaggagcaaaaaccgggtgttttgcgcatttcacatcaaggtgcaacttattctcgcgaaactggttgcaccttatttgctttgttgaatagcattcgcgcccaaggtgcaaccacctctgaggttcggttcatcggctggcggctttcctggggaaacgtcagtcataaatgcgcggcacgcagctacgtctacctacttccagtgggtggtcgtctgacagaccgccgctacataaaaacaaagccagggcgtcactcttatgagcgttagtaatccaaccctgatcacgttcgtgatctacatcgcagcaatggtgctgatcggcttcatggcctatcgctccaccaacaacctttccgattacatcctgggcggtcgcagcctcggtagcgtggtgactgccttgtcggctggcgcttccgacatgagcggctggttgctgatgggcctgccgggcgcgatctacatgtccggcctgtcggaaagctggatcgccatcggcctgatcgtcggcgcctacctcaactggctgttcgtcgccggtcgcctgcgggtccagaccgagcacaacggtgacgccctgaccctgccggattacttctccagccgtttcgaagataaaagcggcctgctgcggatcatctccgccgtggtgatcctggtgttcttcaccatttactgcgcttccggcatcgtcgccggcgcccgtctgttcgaaagcaccttcggcatgtcctacgagaccgccctgtgggccggtgctgcggcgaccattgcctacaccttcgtcggtggtttcctggccgtgagctggaccgacaccgtacaagccaccctgatgattttcgcgctgatcctcacgccgatcatcgtgctgctggccaccggtggcgtcgacactaccttcctggcgatcgaagccaagaaccctgacaacttcaacatgctgaagaacaccagcttcatcggcatcatctcgctgatgggctggggcctgggttacttcggccagccgcatatcctggcgcgtttcatggcggcggactcggtgaagtcgattgccaaggcgcgtcgtatctccatgacctggatgatcctgtgcctgggcggcaccgtggcggtgggtttcttcggtatcgcctacttctcggcacacccggaagtggccggtcccgtgaccgaaaaccacgaacgtgtattcatcgagctggccaagctgctgttcaacccatggattgccggtgtgctgctgtcggctatcctggccgccgtgatgagtaccctgagctgccagttgctggtgtgctccagcgccctgaccgaagacttctacaaaaccttcctgcgcaagaccgcctcccaggttgagctggtgtgggtcggtcgtgccatggtgttgctggtggcactggtcgctatcggcctggccgccaacccgaacaaccgcgtactgggcctggtgagctacgcctgggccggtttcggcgctgcgttcggtcctgtggtgctgatctcggtgatctggaaaggcatgacccgtaacggcgcactggccggtatcctggttggcgcgatcaccgtgatcgtgtggaaacacttcgagctgttgggcctgtacgaaatcatcccaggcttcatcttcgccagcctcgcgatctacttcgtgagcaagctgggcgcaccgactgccggtatggtcgagcgctttgatgcggcggaaaaagactacaacctcaacaagtaattcgccgggcgttaagcgcctgatgagttgaaagaaaggcccgcttcctacggatagcgggcctttttttgcgtgtgctttacgcagacccagagaggattcgtacgcgttcttgtagggttttactgatttgtccggcgcgtgttcggatgacggcagccgtgatgcagaatcggccaccttacccctcgcagagaaacaccggatgttcgctcctgccaatcaaagtgcctttaccctgtccctcgatggggcgcccagtgaattcaaggtccatggattcatggggagtgagttcatcagcctgccttttcgctttgacctggagttggtcagcgagcaacccgacctcgaccttgagagcttgatgcaccgtcaggcgttcctggggtttgacgcgaatggtcatggcattcatggcctggtgtaccgggtggcccaaggcgattcgggcaggcgccttacgcgctatcagatcaccctggtgccgcagctggcttatttggagcacagcactcatcagcggatcttccagaaaaaaacagtgccccagatcattgcgcaggtattggaagcccaggccatcaaggctgatgccttcgcgtttcatctgagcggcaagtatcccgagtgtgagtattgtgttcagtttggcgaaaccgacctggaattcattcagcgcttgtgtgccgaatggggcattcattatcacttccagcacagccccgagcgccaccggttggtgtttggcgacgatcagagcgtgtttgcgcggccggagcacaccacgccgtattcacccggctccgggatggttgccgatgggcctgcgatcaagcgctttatgctgcggctgaagacccgcaccagtgatgtgaacctgcgggactacgacttcaaaaagcccaacctgacgttggaaagcgcagtctccagccagcagcaacccacgctgaacgaccagcgttacccagggcacttcgtggatcgtgagcgtggcaagtacctggcgcaacgcgtgttggaacgtcatcgcagcgattaccgccaggccagcggccatagcgaccaaccggcgttggtcaccggacagttcctgaagatggctgggcaccctcgtcaggagtggaatgacttatggctggtcacccagttgcaacatgttgggcggcaacctcaggtgtttgaggaatctacccctgaagggtatggcgatgaatcctctcaaggctaccgcaatgaatttgtcgtaacgccttgggacgtgctgtttcgaacaccgctcatgatggcgcggccgcccatgtcgggttaccagaacgcagtggtgacgggccccgccgacagtgaaatccattgcgacgaatacggccggatcaaggtgcaattcgcctgggaccgcgccggtgaacgcaacgatcagtccagttgctggctgagggttgccagcggttgggcccatgatcgttatggttcggtactgatcccgcgggtcggcatggaagtcctggtgggcttcgtcaatggcgacccggatatgccgctggtgatgggttgcctgcccaatgcggcaacacaggtgcccctcgatttgccagcggacaaaacccgcagcatcttgcgcagccagagcagccccgggggtggtggctataacgagctgcgcatcgaggatcgcaagggcgccgaggaaatctacctgcgcgcccagcgggactggacgcagcatgtgctgcatgaccatcgggtgacggtggacggcgaatcgcaccatgaagtacagggcgaagagcagcggataaaccatggcagccgcctgaccgagctcaagcaggacgaccatctggtggtgggcggttcgcagcaggtgcgggccgggcagaccatccagataagcgcaggacaaagcatcgtcatcgatgcgggcgcgaccgtcacgattcaggcgggtgggcagtcgatcaccctgtctgccggcggcattttcagcagcgtaccgatccagcctggcggtgggcccgctgctgtagccgcgccgttgatgccgggagtgaaggcaaaactgttggcagtgatccccgctccgctttctcgcgtgcaggttgccagcctgaaacgcagcgcaccgttttgccaagagtgcgagcgttgcaggagcggccagtgcgacctcacctgacttccatctagaaggactctaagtcgatgcttcaacccttgcttgctggtgaaaagatcttcgcagtactcggcgctgccagcgacgccgagcccttgaatgcgtggcgaacgctggccagcggagcgcctttgcatcccgtttgggccggtacggcctatgcgacctgggaggaggtgatgccctatgtgggcgtcgtcgatccagggagcgcgttcttggaatgggccgccgccactgacgctacggattggggttggctggccgtatcgtccagctcgttggacgtggtggtcgcacacttgcaaagcctgaccaaggtgtacctggccgatgggcaggaggtgttcttgcgcttttgggatggggcgcagtttctgccgatccttcaacagcagggtgaagaaatattgccggtattccagcgctacctgatcaatggccaaccactgtcgggggcatctggcccagtcactgccgccaaagccagcccatggtggcgggtgccggcacctttgctggagcacttggcggagcaatcgccgcaaaccctgatcggtaacctgttgcaatggctcgaagagcagcgccccgacctctacacagcttttgcgccgacgaccttgcagcacaaggtcgcctactttgcgcgtcggtcggatatcagccatgaagcgctggctgactacctggcctcagagctgagttgagcccagcgcctgctgcaaatcttcgagcaggtcttcaatggcctcgatgcccaccgacaggcgaatcatctccggcttcacaccggccttggcttgttccagttcgttcatctgccgatgggtggtggaggcggggtggcaggccagggatttggcatcgccgatgttcaccaggcgcttgaagatgtgcagtgcgtcatagaagcgcacgccggcctcatagccgcctttcaagccaaaggacaggatcgctgagggtttgccttgcaggtacttctgcgccaattcgtggtgcgggtggcccggcaggcctgcgtaactgacccactctacctcggcatggccttgcaggaactgcgcgactttcaaggcgttttcagtgtggcgttccatgcgcagggccagggtttccaggccttgcagcagcaggaaggcgttcatcggggccaatgccgcgccggtgttgcgcagtggcacggtgcgggcgcgggcgatgaaggcggcggggccgaatttttcggtgtagaccacgccgtgataggcgggctcggggttgttgagcccggggaatttctgcgggtagtcggtccaggggaagttgccgctgtcgacgatcacgccgcccagggagttgccgtggccgccgatgtacttggtcaccgagtgcaccacgatatcggcgccgaacatgatgggtttgcacaggattggcgtggccacggtgttgtccaccaccagcggtacgccgcgcgcgtgggcgaccttggccagggcctgcaggtcgacgatgttgcccgccgggttgccgatgctttcgcagtacaccagcttggtgtcgtcgtcgatcagctcggcgatggcttcggcggagtcatcccgggcaaagcgtacatcgacgccgaaactgggcagcaagtgtgcaaacaaggtgtaggtgccgccgtaaagctgcggggtggtgacgatattgtctccggcgcgggtgagcgtctggatcgcatagtggatcgccgcgctgccggcggacaccgccaggcctgcgataccgccttcgagcgcggcgatgcgctgctccagcacgtcattggtggggttcatgatccgcgtgtagatattgccgggcacgtccaggttgaacaggtcggcaccgtgctgggcgttgtcgaattcgaaggcgacattctggtagatcggcacggccacggctttggtagtcgggtctgaggtgaagccgtggtgcagtgcgatagtggcgtctttcatgatggtgatggacctccctggagtgtggatcgccacaataagtccgagtcatggctgatatttagacttttttcaggtggatacctgtcttttcgatataagcaccgcccggcacgttgctctgcaccaacgctcgcgtaaaaggtaaacttcgccccctgcgcaggagcaaccatgaattatcgtcacgcctttcacgccggcaaccatgccgatgtcttcaaacacctgaccttgacccgcctcatcgccctgatgtcgcgcaaggagcagccgttcgcctacctcgacacccatgccgggatcggtctgtacgacctgcagggcgaccaggccaaccgcaccggtgagtacctggaaggcatcgctcgcctgtggggcgaaagcgacctgccaccgttgaccgccgattacatgcgcgtgctgcatgagatgaacccggatggcgagttgcgctactaccccggttcgccggaactggcgcggcgcctgacgcgccctcaggaccgcgtgctgctcaatgagaagcacccggaagacggtgtgttgctcaaggacaacatgaagggtgaccgccgcgtcaaagtgcacctgggcgagggttggcacgtaccgcgtgcgctgctgccggtgccggaaaaacgcgcgctgatgctgatcgacccgccgttcgaaaagctcgacgagatgcaacgctgcgccgcctccctcaaggaagccgtgggccgcatgcgccagaccgtcgcggcgatctggtacccggtgaaggaccagcgcctgttgcgccgcttctaccaggacctggctggcaccggtgcgccgaagttgctgcgggtggagttgctggtgcatccgcttgacacccccaacaccctgaccggctcgggcctggccatcgccaacccgccatgggggctggaagaggaactgcgtgagctgctgccgtggctgtccaagaagcttgggcagacccagggtgggtggcagatggattggctgatcgctgaataaccggatctacaggcatatataaaaacaatgtgggagggggcttgcccccgatagcgatctgtcagttacagatgtactgactgacacactgccatcgggggcaagccccctcccacattttgacccgtgtcggcttcagatcgggcaggtcacgccggtgccgccgatcccgcaatagccctgcggattcttcgccaggtactgctggtgatacgcctcggcgaagtacaccgtcggtgcttcttcgatttccgtggtgatcgcacccaaccccgccttggtcagttctccctgatacgcctcggcgctggcctgcgccgccgccagttgttccggggtggtcgcatagatcaccgaacggtactggctgccgatgtcattgccctggcgcatgccctgggtcgggttgtgcagttcccagaacattttcaacaaatcttcgtatttcactttggcctggtcatacaccaccagcaccacttcgctgtggccggtcaggcccgagcagacttcttcataggtcgggttgggcgtgtagccgccggcgtagccgaccacggtgctgaccacgccatcgcgctgccagaaccggcgttcggcaccccagaagcaacccaggccgaagattgcaaagccgacatcatcgaggaacgggcccagcagcgggttgccattgacgaagtgcgtctccggcaatgccatcggggtttcacggccaggcagagcttgttcttgagtaggcagcacgtttttgttcaccagaatttccgagcgcaagaccatgatcagtcctctcgtcaggttgagttagcaataaagattgagaccgccagtgtgcccgagtgttacagcgctgtcaggcgattggcccgcgcgggtagcgtttgagcatcgccagcagctcggcgccggggatcggccggtcgaacaggtagccttggcccacatcgcaacggtgccggcgcaggaacgccagttgctcggcggtctcgatgccctcggccaccaccttgagcttgaggttgtgggccatggcgatcactgcggaggtgatttccatgtcgtcctggttgtccgggatttcgtggatgaagctgcggtcgatcttgatgatatcgatggggaattttttcaggtaactcaacgacgagtagccggtgccgaagtcgtccatggccagggtcaggccgaagctcttcaattgatctagctgcaggcgcgtgtcttcggtggcttccagcagcaggccttcggtcagctccagctccagcaggttggccggcagttgttcttccttgaggatcgtggcaatcgaggccaccaggtccgggtcggaaaactgcttgggcgacaggttgatcgccacctgcaagttacccatgccagcggcggtcaactgtcggctcatgcggcaggcctggcgtgcgatccatttgccgatggggatgatcaggccggtttcttcagccacgctgatgaattggtcggggcggatcatgcccttttccggatggttccagcgcaatagcgcttccatgccgagcagacggccactgcgcaggcacagcttgggctggtagaacacgtccagttcgttctgggtgagggcgcggcgcaggttgttctccacgaacagcttgtagctggcctcggcattcagtgcttcggtaaagatctgcacctggtgtttgccattggccttggccttgtgcagggccaggccggcgttgcgcatcagggtctgcgggtcgcggccatgcagtggcgcgcaggccagaccgacggagccggtgacactgatcaattggttatcgacgaacatcggcttgtcgagggtcgccagcaattggctggccaccagttggccgctttccaggtcagtgtcgtcgagcaacaccgcaaactcgttactggcaaagcgcgccaggctgccgccggtgctcaggctgttgcgtaggcggcgagccaggctgatcagcagcttgtcgccggtctggtggccgaggctgtcgttgatgcgcttgaagttgtcgatgtccaccagcagtaggctgatcgggctgtcgctgtcacgggcaaagcgttcatcgaggttgcggatgaacgccggacggttgcccaggttggtcaggttgtcggtgtaggccaggcgctcgatgcgctgctgggccagcttggtctgggtgatgtcttcgtagatgccgatgtagtgcgtcaactcgcggttgtcgccgtacaccttggaaatcgacaactggccccaatagggctccaggttcttgcgccggcttttgaattcaccctgccagctgttgctcttggccaggctcgagggtgcgtcgaagagcaattcgctgaggttctccagcgctggcaattgggccaggcggtggccgtggacctcttcggcgctgtactgggtgatcgcggtaaagcttgggttgacgtactccaccacgccgtcgcagttgaccagcagaaaggcattggcgctttgttccacggcacgctggaacaggtgcagggcgctggtggcggtgcggcggttgtggttgttgatcacctgggcgaactggtcggccagttcgccggcaaaggcaatttcatcggcttgccaggcgcgggtgctgccgctttgctccaggcacagcacgcccaccacatgaccatcgacacggatgctggcgtcgagcatggcgtggatgtctttgtcgcgcaggctgtcggccatttcccgggtgcgtgggtcgcgcagtgcgttggtggcgtcaatggcccggctggagtgcaaggcttccaggtagtccgggaaacagctggcgtcgatgggctcgggcaagtggtgctgcccgtccgcgcggtgataggcggagatcggcaccaggcgctggccttcgaggttccagatgctggcgcagtcgatctggtagatatcgcaggcgctgcgggtgatcagctcggcggcttcctgcaacgaattgtgggtggtgtagcgctggcgggccagcaacagaatcagttcctgctgggcgcgcacccgctccagatgctgcagctgttcctgctgggcgcgttggttgagttccagggcgatctgcaggcggctgttctggttttccaggtctgccgtgggcacggcagtagggatttcactgaacaggccgtcaaccaccatcaggtagccgcgcagcaagtggcgattgtgttgtttataggcctcacccatttccagcagactcagcgggccgtcgctggtgtgcagggtatagcgcaccaggtaatgcgggctctgggtcagttgctgctggatggtgtcgtgcagttgatagcgcgcctggggctccatcaggctggcgtatggggtgccgatcagcgcgcacagctcgacagccggcaggccgaattggcgctcgcagttagggtcgaggtaaaggagggcccagcttgcctcattcagccgctcgaaacgcagcataccgaggcgcgaaggcaccggtaactgcgtcactacctcggccgccatacgggcgacatcgggctggcttttcatgggggaaactcacttgaaattacgcgcacggcgccgggctcgcgccctcttttctgttgcctgcggcaaggttgcatcatgcggcgcgggctgacaagagaggatgaaggctaagtgctataagggggttatcggctgtagaagggatttctgcaatcgaggtgatggaaggtgtacaaacctgttttgcgcgtccagcttcttgcctgaaaaccggcaaaaaaagccccgccaagtggcggggttgaggtacgagcgtggcgctcgaaaatcgatgcagccaggcctcctcggtgaagaggaggccgtggcggcttacagcaggatagtgcggatatcgttcagcacttggcccaggcgctgggtgaagcgcgcagcggcggcgccgttgatcacacggtgatcgtaggacagcgacagcggcagcatcagcttcggctggaacgctttaccgtcccaaaccggctggatagtcgccttggacacacccaggatcgccacttccggcgcgttgacgattggcgtgaagccagtgccgccaatgtgcccgaggctggagatggtgaagcatgcaccctgcatgtcgtccggggtgagcttcttgtcgcgggccttggcagccagtgcggcggcttcggcagcgagctgcagcaggctcttctggtcgacgttcttgatgaccggtaccagcaggccatccggggtgtcgaccgcaaagccgatgtgcacgtacttcttgcgaatgatcgccttgccgcttggcgccagcgaactgttgaagtccggcagctccttgagcaagtaggcacaggccttgagcagcagcggcagcacggtcagtttcacgccggctttctcggccacggctttctgcgcaacgcggaaagcttccaggtcggtgatgtcggcctggtcgaactgtgtcacgtgcgggatgttcagccagctggcgtgaaggccggccgcgccgatttgcatcaggcgggtcatcggcacttcttcgacttcgccgaagcggctgaagtcgacggtgcggatcggcggaatgcccgaaccaccggtagcgccgccagcagctggcgcttccttggctttctgcatcatggccttgacgtagacctgcacgtcttccttcagcacgcggccgtgcgggccggtggccgacacagcattcagctcaacgccgaactcacgggccagctgacgcacggcagggccggcgtgaaccttggcaccgcttggcgcaggtgcggcagcagcaggggctggagcagcctcggcttttgcagcaggtgcaggtgcagcagccggagccgcttcagccttggcggccggagcagcagccggtgctggcgtggcggccggcgcagcgccttgtactttcagcttgaggatgaagtcaccggtgccgacttcgtcttccagcttgaccgcgatgctttccaccacgccggcagccggcgaagggatttccatggaggccttgtcggactccagggtgatcagcgactggtcggcttcgacggtgtcgccgaccttgaccagcagctcgatgatcttggccttgcccgacgagccgatgtccgggacatgaatgtcctggacgctggcggcggcaggtgcagctgccggggccggagcggcctcggcagcaggtttttcagcagcaggcgctggtgcagcagcggcagcaggagccgccgcaggggccgcatcagcggcaccttcgatttccagctccagcagttcgtcgccttctttcaggcggtcgcccagcttcactttcaggctcttgaccacgccggccttgggagcagggatttccatgctcgccttgtccgactccagggtcaggatgctctggtcggcttcgacggtgtcgccgaccttcacaaacagctcgattacttcaccttcaccgctgccgatgtcaggtacgcgaatgagttcgctcacaaaaaatctcctcagcagtccagtgggttgcgtttttccgggttgatcccgaacttgacgatagcgtcagccaccaccttcggttcgatctcaccacggtcagccaaggcttccagggctgccaacaccacgaagtgacggtcaacttcgaagaagtgtcgcagcttcttgcggctgtcactgcggccgaaaccgtcggtgcccaggactttgaattccttggacgggacccactggcgaatttgttcagcaaacagtttcatgtagtcggtcgaagcgatcaccgggcctttacggccggtcaggcactcttcaacgaaggtgcgctgtggcttctggccagggtgcaggcggttgtgacgctctacagccaggccatcgcgacgcagttcgttgaagctggtcacgctccacacatcggcgccgacgttgaactcgtcacgcaggatcttagccgcttcacgcacttcgcgcaggatggtgccggagcccatcagctggacgtggtgcgccgcttccttggtgtcttcttcgagcaggtacatgcccttgatgatgccttcctcgacaccggccggcatggctggctgctggtaggactcgttcatcacggtgatgtagtagaaaacgtcctgctgctcttcggtcatcttcttcatgccgtcctggatgatcaccgccagctcgtagccgtaggttggatcaaaggtgcggcagttcgggatggtggcagccaggatatggctgtgaccgtcttcgtgttgcaggccttcgccgttcagcgtggtacggccggcggtgccgccgatcaggaagccacgggtacggctgtcgcctgctgcccaagccaggtcgccgatacgctggaagccgaacatcgagtagaagatgtagaacggcagcatcggctggttgtggctggagtacgaagtaccggcagcgatgaaggagctcatggcgcccgcttcgttgatgccttcttcgaggatctggcccttcttgtcttccttgtagaacatcacctggtctttatcgactggctcgtagagctggccgacggaggagtagatgcccaactgacggaacatgccttccataccgaaggtacgggcttcgtccgggatgatcgggacgatgcgcgggccgatttccttgtccttgaccagctgcgccaggatccgcacgaaagccatggtggtggagatttcacggtcgcccgaaccgtcaaggatggccttgagggtgctgaggtccggcgtcggtacgctgaagctctgcgcacggcgttgtggcacgaaaccacccagcgcggcgcggcgttcggccaggtaacgggcttcggcgctgtttggctccggcttgaagaacggcaggttttccagctcttcgtccttgaccgggatgtcgaagcggtcacggaacaacttcaggctgtcgacatcgactttcttggtgttgtgcgcagtgttcttcgcttcgccggcaccggtgccataacccttgatggtcttggccaggatgacggtcggttgttccttgtggttcaccgcttcgtggtacgccgcgtagaccttgtacgggtcgtggccgccacggttgagtttccagatctcgtcgtcggacaggtcggcaaccatcgccttgagttcaggcgtgttgaagaagtgttcgcggacgaacgcgccgtctttggccttgtagttctggtactcgccgtcgatgacttcgtccatgcgacgctgcaggataccgtcgacgtccttggccagcagtgggtcccagaaacggccccagatgactttggtcacgttccactgggcgccgcggaatacgccttcaagttcctggatgatcttgccgttgccgcgaaccgggccgtcgaggcgctgcaggttgcagttgatgacgaagatcaggttgtccagcttctcgcggccggccagggagatggcgcccagggattccggctcgtcgcactcgccgtcgcccaggaagcaccagaccttctgcttgccttcagggatgaagccacgggcttccaggtacttcatgaagcgtgcctggtagatcgcttgaattggacccagccccatggaaacggtcgggaactgccagaaatcaggcatcagccaagggtgcgggtacgacgacaggccgttaccgtccacttcctggcggaagttgttcatgtgttcttcggtgatgcggccttccatgaacgcacgggcgtagacgcctggcgaggtgtggccctggaagtagatcaggtcgccgccgtgttcgtcggtcggggcctggaagaagtagttgaagccgatgtcatacagggttgcactggaagcgaagctggagatgtgaccgcccaggtccgaatctttcaagttcgtgcgcattaccatcgccatggcgttccagcgtaccaacgagcgaatgcggcgttccatgaacaggtcgccaggcatgcgtgcttcgtgggtaacggggatggtgttgcggtatggcgtagtgatggcgtaaggcagttgcgagccgctgcgggtcgcgagttcgcccatacgggtcatcaggtagtgagcacggtcttcgccttctttgtcgagaaccgattccagggcgtccagccattcctgggtttcgacgggatcgaggtcttgcatggcttgctccagggcggaaaggctaccagaatcggttgcctgaagtttgcgactggccttgtgggcagacgacataaattcttggatggccgaaggttgcttcggcgtcctgtagttttactacaaatcgtcggccatttcagcctttcgaatgtatatacgagtagtaaaactacacaagactgagcgtatggctcggtctggctggtgagcataatcgttattgttgatcttttgcgaacaagaaaaggtgaaagtttgatgttggctgccaaaatgaaattaatttcagctatttctaacctttgttcgacagtccttcatagagcgtggttcttgcgttcacaacacgtagccaattacacgccgatcaaggatagaccatgagccttccaacactggcccaactcccggccattctcttgccaaaagcccagcgggccgagcagtcatttcgtgacgcagtggccgcgctggacgatgatcatggactttctgcgtggacgccgcaacggtgggccgacttcgcccgcgtgtgcgccgccagtgatttcgtcattgaacagagtgttcgtgaccctttgatgttgcttgagctggccgccttgggcgaactggaccgaggtttcgcacctggcgagctgtgcgggcagattgctggcgccgtgcgacaagccgaaacagaagatgagctgggccgtgtgctgcgtcgccagcgcacacgccagcaagtgcgcatcatctggcgcgacctgacccgtcaggccgacctggtgcaaacctgccgcgacctctccgacatggccgacgccagcatcgaccaggcctaccagtggctgtaccaacgccactgcgtacagttcggcacgcccaccggccgacgcagcggcgagccgcagcacatggtcatcctcggcatgggcaagctcggtgcggtggagttgaacctgtcgtcggacattgacttgatcttcgcttacccggaaggcggcgagacggtgggtgtgaagcgcgccctggataaccaggagttctttatccggcttggtcaaaaattgatcaaggccctcgacccgatgaccgtcgacggcttcgtgttccgcgtcgacatgcgcctgcgcccctacggttcagccggtgcgctggttctgagcttcaacgcgctggagcagtattaccaggatcagggccgcgactgggaacgctacgccatgatcaaggcgcgggttgtcgccggcgaccaggtggccggtgcgcaattgctcgacatgctgcggccgttcgtctatcgccgctacctggacttctccgccatcgaagcgctgcgcaccatgaagcagttgatccagcaggaagtgcggcgcaaaggcatggccgacaacatcaagctgggctcgggcggtatccgcgaagtggagttcatcgcccaggcattccaattgattcacggtgggcgcgacttgagcctgcaacagcgcccgttgctcaaggtgctcggcactctggaaggccagggctatctgccaccggcggtgattgccgagttgcgcaatggctacgaattcctgcgttacaccgaacacgcgatccaggcgattgccgaccgccagacacaaatgctcccggacagccccgaagaccaggcgcgcattgcctttatgttgggttttgccgactgggacgccttccatgagcgcctgatgtactggcgtggccgggtggactggcacttccgccaagtgattgccgatccggacgaagaagagggcgaagaaagcgagttggtcgtaggcggtgagtggttgccgctgtgggaagagtcccaagatgaagaggctgcctgccgtcagttggccgaaggtggtttttccgacgcggccaaggccctcaaggcgttggcaggcctgcgcaacagcccgcaactacgcgccatgcagcgtttggggcgcgagcgtctggatgcgttcatcccgcgtcttctggcccaggcggtcgagcatgccaacccggacctggtactggaacgtgtgctgccgctggtggaagccgtcgcccgacgttccgcctacctggtgctgctcacggaaaaccccgatgccctgcgccgcctgctgaccctgtgcgccgccagcccgtggatcgccgagcagatcacgcgcttcccgctgttgctcgatgaattgctcaacgaaggccgcctgttcaagccgccgttggcgccggagctggccgccgagttgcgcgagcgcctgacgcgcatcccggaagacgaccttgaacaacagatggaagccttgcggcacttcaagctggcccaccgcctgcgcgtggccgcctcggaaatcgccggcagcctgccgctgatgaaggtcagcgactacctgacctggctcgccgaagccatcctcgaacaagtgctggccctggcctggcgccagaccgtggcgcgacacggctcgccgcagcgcctggacggcaccctgtgcgatcctggcttcatcattgtcggttatgggaaagtcggcggcatcgaactggggcatggttcggacctggacctggtgtttatccacgacggtgacccccaggccgagaccgatggcgccaagcccatcgacggtgcgcagttcttcacgcgcctgggccagcgcatcattcatttgctgaccacccagaccaactcgggccaactgtatgaagtggacatgcgcctgcgaccttccggcgcatccggtttgctggtgagttcattgggcgcgtttgagcgctatcaacaaaatgaagcctggacctgggagcatcaggccctgatccgggcgcgggtgctggtgggcagccaggatgtgggccaggcgttcgagcaggtacgggcgaacgtattgggacaggaacgggacctggcgaagctgcgccaggaggtcagcgagatgcgcgccaagatgcgtgacaacctgggcaccaagggcacggcggccggcaccggcgccaatgccttcgaagccacggcgctgttcgacctcaagcaggacgccggaggtatcgtcgatattgaatttatggtgcaatacgccgctttggcgtggtctgcgcaacatccatcgttgctgcgctacaccgacaatatccgcattctggaaggcctggagcaggtgggcttgatgcccgccgccgatgcccatctgctgcgcgaggtgtataaggcctaccgatccgccgcgcaccgccaggccttgcagaacgaggccggtacggtggccggggatcagttcgccgacgaacggcgccaggtgatgcgaatctggcaggcgctggagttgagctgaaacactattacggcggggaggcataagcctccccgcatcgtttgtggaaactacatgaatattctgatcgttgggcccagttgggtcggtgacatggtaatggcgcagacactgttccagtgcctgcgcgtgcgttacccggactgccagatcgacgtgctcgcccccgagtggagtcgcccgatccttgagcgcatgcccgaggtgcgcaaggccttgagcttcccgctcggccacggcgccctggaactggcgacccgccgtcgcatcggtaaatccctggcgggcgagtacgaccaggcgatcctgctgcccaactcgctcaagtcggcgctggtgccgtattttgccggcatccccaagcgcaccggctggcgtggcgagttccgctacgtgctgctcaacgacgtgcgcacactcgacaaagcccgctacccgctgatgatcgaacggttcatggccctggcctacgagccgggtgccgagttgcccaagccgtatccgcgcccgagcctgcagatcgacccggcgagccgcgacgcggccctggccaagttcggcctgaccctggaccgcccggtattggccttgtgccccggcgccgaattcggcgaatccaagcgctggccgtcggagcactacgcgaaggtggccgaggcgaagatccgtgaaggctggcaggtgtggctgttcggttcgaagaaggaccatccggtgggtgaagacattcgccagcgcctgattcccggcctgcgcgaagaggcagtgaacctcagtggcgacacgtccctggccgaggccatcgacctgctgtcctgtgccgattcggtggtgtccaacgactccggcctcatgcacgtggcggctgcgctgaaccgcccgttggtggcggtgtacggctccacctcgccgggcttcacgccgccgctggccgatcaggtcgaagtggtgcgcctgggcctggagtgcagcccgtgttttgaccgtacctgccgcttcggccactacaactgtatgcgccaattgctgccgcagccggtgaacgaagccttgcagcggttgcagggctctgcggtcgaggtccgatagtttgcgcgtactggtaatcaagacctcatccctgggcgacgtgatccacgccttgccggcattgaccgacgcggcgcgggcgatccccggcattcaattcgactgggtagtggaagaaggttttgccgagattcccacctggcacccggcggtcgacaaggtgatcccggtggcgatccgtcgctggcgcaaaaacatctggcaaaccatcaagagtggcgaatggcggcgcttcaagcagcaagtccagtcgaccaaatacgatctggtgatcgacgcccagggcctgctgaaaagcgcctggctgacccgttatgtgcgtgcgcccgtcgcgggtttcgacagaaactccgcccgcgagccgatggctgcgcgtttctattcgcgacgcctcgccgttgcgcgagggcaacacgcggtggagcgtctgcgccagttgttcgccgtggcgctcggttatgacttgcccaaaggcctgggcgactacggcctgagcacggaaaaactcctgggcctgccgccgaaaaaaccttttgtgctgctgttgcacggcaccacctgggacaccaagcactggcctgaagcctactggcgcgagctggccgagcgcatgggccgcctgggcgtcgacgtgaaattgccctggggtaacgccgctgaaaaagcccgtgccgaacgcctggcccagggcctgcaaaacgccgaggtgctgcccaagctgaacctggccggtgtcgcccgtgtattggccggcgcccgtgcctgtgtggcggtggacactggcctcgggcacctggctgctgcgttggacgtgccgaccatctccctgttcggcccgaccaaccccggcctcaccggcgcctacggcaagggccagattcatctggccagcgacttcccctgcgcgccgtgcctgcaaaagcaatgtacctatcaaccgacggccgacgacctgcgtcggttcgacctcaagcgcgagtcgcccctgtgcttcacgcgcctgaaccctgagcgtgtggcaagccgactgagcacgttgttactggctgaggagctgcactgatgcaactggcttttgtgctgtacaaatatttccccttcggtggcctgcagcgcgacttcatgcgcatcgccctggagtgccagcagcgcggccatcagattcgtgtgtacacgctgatctgggaaggcgacatcccgcccggcttcgaagtgctggtggcgccggtcaaggcgttcttcaaccatcggcgcaacgaaaaactcagcgcctggatggccgccgacctggccaagcgcccggtggaccgcctgatcggcttcaacaaaatgcccaacctggacgtgtactacgccgccgacggttgctttgaagacaaggcgcaaaacctgcggcactcgctgtaccgctactttggccgctacaagcattttgccgagtacgagcgcgcggtgttcgccaaggacgccaagaccgaagtcctgatgatttccgaagtgcagcaaccactgttcatcaagcattacgacaccccggtggaacgcttccacctgctgccgccgggcattgcccaggaccgtcgcgcgccgccgaatgccgccgaaatccgcgaaggtttccgcaaggaattcaacctcggtgacgacgagctgctgctggtgcagatcggttcgggcttcaagaccaagggcgtcgaccgcagcctcaaggccgtggccgcgttgccgtctgaactgaaaaaacgcacgcgcctgtttgtaatcggccaggacgaccccaaggtattccaactgcaaagcgctaccttgggcctgggcgataatgtgcagtttctcaagggccgcagtgatatcccgcgtttcctgctgggcgccgacctgttgatccacccggcgtacaacgaaaataccggcaccgtcttgctcgaagccttggtggccgggctgccggtactggtctcggccgtgtgtgggtatgcccactacatcgccgaggccgacagtggcctggtactggatgagccgtttgaacaagcacagctcaatcaatacctgacgcacatgctcaccgacactgcacagcgcgcggcctggagccgcaatggcttggccttcgctgagacggccgacctttacagcatgccgcagcacgctgcggatgtgattctggcggagccaaaacgatgaagttgattcttgccgaaccgttcaagactttatgggccgggctcgatgcctttgccgaagtcgagaaactgcaaggtgaagtattccgtgaactggcggcgcgtcgcaccctgcgtaccgaggtggatggccgtccgtatttcgtgaagatccaccgtggcatcggctggggtgaaatcttcaagaacctgatcaccgccaagctgccggtactcggggcgggccttgagtgggcggcgattcatcgcctgcaggcactcggcgtgccgaccatgaccggtgtggcgttcggcgagaagggcagcaacccggcggaccagcactcgttcatcatcaccgaagagctggcgccgaccctcagcctcgaagacgtcacgatcaactgggtcgccgaaccgcctgcacccgcgttgcgtcatgccctcacggccgagctggcgcgcatggtcggcgatatgcaccgggggggtgtgaaccaccgcgactgctacctgtgccatttcctgctggacactgccaagcccatcgatgcgaacaacatcaagctgtcggtgatcgacctgcaccgcgctcaactgcgtgcccacctgccgctgcgctggcgcgacaaggacctctccgcgctgtactactcggcgctggatatcggcctgacccgtcgcgacaaactgcgttttctcaagggctacttccgccagccgctgcgccagatcctcgccgagcaatcagcgtccctgagcttgatgcagcgcaaagccgacaagctgtatgcgcgcaagctgcgttatggggatgcgatctgatggcgggttggaacctggaacctgcgtacgccagcctggcggatgatttcggcagcctcgaagcggtcttcgccctgcaaggcgagcgcctgacccgcgatccgctgtcggaagtgatccgcgtggagcgcggcggggtcaactattacgtcaagcgctacatcggtgccggcaaagggctgcggcgctacctgggcaagccgcgggtcaagtccgaatggcagaacctcaagcgttttgccaaatggggcattcccaccgccgatgtggttgcctgggggctggagcgcaagggcctggcctatgatcgtggggcgatgatcacccgcgaactgccgaagaccgaagacctctcggtattggccgagcgcaacgatgcgcgcctgcacgatcccaagtgggtcaacgcggtgagccgtcagctcgccgaatacacgcgcaccatgcacgatcatcgctttacccataacgacttgaagtggcgcaacctgttgatcgatgaccaccagaccctgtacctgatcgactgccccaacggcgatttctggcgcgggttctggctcaagtaccgcatcaccaaagacctggcctgcctggacaaggtggccaagtatcacctgtccgccacccagcgcctgcgtttctacatgcaataccgtcagcgccagcacctgagtgcagctgacaaacagcgaattcgccacgtggtgaagtttttcgagggacgtgaatgagtgatttcctggcggctgaggaccgggcgctgctggagcgcaacggtttggcgacgttcgacgccctgtgggccaaacaactggatgcagtggatgaacccaacaccagtcgcggcggctggagcagcgtctttcgcctggagctcgacggccacggttattacctcaagcgtcagagcaactacctgacgcgcagcctgcaccgtccctttggcgagccgagtttctcccgcgagttccgtaatatcagtcgttaccgcaagctcggcatccctgccttgcaggcggcgttctacggcgaacgcaaggtgggcggcgagcatcgcgccatgctgctgacccgtgccctggacggctggaatgacctggattcgctgctggagcagtggccccaactgagcgatgcccagcaccgcgcgatcctgcgggcctgtggtgagcttgctcgtcggttgcacagcgtcggccaggtgcatggctgtttttatcccaaacatattttcatgcaggctaccggcgacggttatgccgcgcagttgatcgacctggagaaaacccgcccgctgctgttcggctggcgtgatcgggtcaaggacctggagccgttgctgcgacgtgcaccgcagtggtcggatgaacaggtacgccaactgttggccgcctatctggatcaatcgaaggacagcgcgctggtcgccacctggctgcagaaactgaccgcgcgccgtagtcacaaggaaaaccgttgatgcgtctgtccgagctgaaaaccgccggccgtacccccgagctgcccctgacccttgagctggccgatgcggcgggcccaggccagttgcaactgctgagcctgttgcgtgtgctgccgggcgagcgttatgtgggggcggcggtttggcgtggtcgtccggtactggccaaattgttggtgggcggcaaggcggcgcggcactttcagcgtgaactcggcggcgtgcgcttgctcgccgagcaaggcctgaccacgccgttgctgctggccgatggcttgcaggaaggcgagggcggctggttgctgttcgagttcatcgagggcgccgaaagcctggccgatgcctggcaggccatcgaagacctgccgccgctggctgacgagcaaaccgccgtgctggccgaagcgctgggtgcgatcgcccagatgcacaccaagggcctatggcaggaagacctgcacctggacaacctgctgcgccaggacggcaagctgtacctgatcgatggcgccgggatccgcgtcgaagaggcgggcaaaccgctgtcacgcaaccgtgtgctggaaaacctcggcgtgtttttcgcccagttgccgaagaatctcgagccgtttaccgaagaactgctggtgtactacctgctgagtaacggcgagcatgccctgccgctggaggccctggagaaacaggtgcgcaaggtcagcgcctggcgtctcaaggacttcctcaacaaagtcggccgcgaatgcacgttgttcagcgtggtgcgcggcgcctttgccttgcgtgcgatccgccgggaagaagaaccggccatgctgccggtgctggaacaggctgatgcgctgctggaccagggccatttgtacaagaccggcggcgccgccagcgtggccaaggtcgaggtggccggtcggccgctggtgatcaagcgctacaacatcaagggcttcgcccactggctcaaacgcttctggcgtccgagccgagcctggcactcctggcgcgaaggcaatcgcctggcgttcctcggcatcgccacgcccaagccgctggcggtgctggaaaaacgcttcttctggttgcgcagtcgcgcttacctggtcaccgaatacctgcccggcccggacatcatcgagcgcttcgcaccttacgttgaaaatggtgacgcgccggaaaacgaactgttggcgctggatcacctgttcgccgaactgatccgcgaacgcatcagccatggcgacttcaaggggcacaacctgttctgggacaaggaccgctggtcgctgatcgacctggacgccatgtgccagcacagctccgacacgagcttcgccccggcctatgccaaggacagggcgcggtttatgcgcaattggccgcaggacagcgcgttgtatcaattgattgatcagcggttgcccaaagtgagtcagtctggtggccccctgtagcaaagccgtagggcagtatgaatgttgatgcgtgactcggaaaacacgcaaacaacaggattaggcaccccatggcagatgaaaaactaacgtcccctcagttcatgctctttgaaagtgaaactgaggcagagcgcgctgcgcaagttcttgcagtgacgccgccgaaaggtgcgttcagcgacttcattgtgtatgtggatgaaagtggtgatcacggcatgcaggcgctggatgcgaactaccccatgtttgttctagcgttttgtgtttttcataaaagacactactgtgaaaaagtcattccggccctccaaaagtttaagttcaatcatatggggcatgatctcggcgtttttcaaggtagttgtcgtgtctcccgtcttgctaggcgaccttcacgacaactgtcagctccctttcgggattgaggtacaccgtcccgatagggtcccagttgcgtgtctcgcctgaccacctttcaggccttttttctctcgcttgcccatagattgccgccctccgggccaagatttcccggtcttttccctcgtggcgctgggcgggtgtca

SEQ ID NO: 21 - DNA, 108594 bp, Pseudomonas nodulensis
catcattttcaacagcgcagctttgcgttcttctgaatagaaaggcatgaccttactcttgccgcccccggaatacttttaaaaagcggaggacacgacaactaccctgacaccgggggatcttgttggcctgcatgaattggaaatacgtaaggaaaagggggctttctcgaacgtttttgtctctcgccagcacaaacatgcctttcttgaggagctgacaagcatcattgagtcgagcaactttgttttgatcagttgcgttattgataaggtcactcttcgggagcatcaaggtcccgtacataacccctaccatatggcgcttggattctgtcttgaaacgctttatgagtttctcagtgagaaaaatcagcagacagcgttgacccacgtcattttcgaacgacgagggcgtaaagaagataacgcgcttgagttggagtttcgacggatgtgcgacggtgccaatcgtttaggtattcgcctgccatttgacatcgtgtttgcgactaaacaggttaattccacggggttgcaacttgcagatctcgttgcaaggccgataggcatgagtgttctacggcgtggtcaggaaaaccgtgcctttgatgtgctcaagcgcaagttttactgcagcggaggacgaagcaaggtcggtgagggttatgagaactggggacttaaagttttccctaccgcagaaagcgaaaagccccgatgaaactcaccgaggctataacgccgaccgggatcccccagtccatttgcgccagattctatgcttgcgatttttgagtgtcaatgcagagtaattactgctcctcttgcagaatagatgggtgatcagaatcggtactcagcacctgctccggcataccacgagcgccctggcgccgcttcgtaatagcggttattgccgtcgccgacgatcaccgagccgacgtactggcggtcgagcaggttatccaggcgcagggtctggtggaaggtccagtgctcgactttctgctcaaagcgggcgcgccagttgaacacgctgtaggccggcgcagcgtgttggctgttggtgtcttcgacgtagacctggctgcggtacatgccttcgagggcggtgctgacccagtcgcggggcttccagttgagctctgcgaacagggtggtttgcggtacgccgggcaggtagttgcccttgtcgacggcggtgttgccgccgctgacgaagtcactgtcgtaggtagcttgcaggcgggtgtaggcgaggttggcggtccactgttcgctgagttggctttcgatgcccagttcgaagccgcggcgcagggtgcggccggcgttttggtaagtggtgcgaccgccgctggattgctgcaccaccaactcgtcttcggtggtgatctggaagactgcagcgttgatgcgggtgtcctggccaacgcgtgccttcaggccgacttcgtactgtgtactgaccgatggcttgagcgcgaagttaaagccgtttgagctgctggaatacgctgactccgcttgtgtcggggtttcaaagcctttgcccgcgctcacgtagccgtgcaggttgggggtaaacgcgtacatcacgctgaccgagggcgtgttcttctggtaagtcttgctgccgctgtcgttgccgtcgctgagaaaatgatcgtccacgtccatcttcatggtgctgtggcgcaggccggcttgcagggtccagtcgcccagcagccaattggcctgcacgaaggggtcgaggctggtggcggtgtcgatttcatcacggcccagtgcgcccttgacgccgtgcacgccgttggcggtgttggaatagccttggcgatcatcttcgctgcggtcgtagtcgaggccggcgatcaaggtcagttcgcccggagcgctggtgacgggttgtagccagtggatggagccaccgtagaacttgcggtcgaacgccaccacaccgcctcgcacgttggcggggttggtcgcaccgctggggaatttgtcaggaatcgacaagtactgaatcacactccgccgccccgtatacccattcacctgcagcgtcgcatcgccgaagtaccgctcgtaattcatgcccaattgctgatgatcgatacttttgcgcgtgttgtacgtcagcgcgttggcgctcaccgagcgcgggtcggccttgtacgccgcccacgtctgccccagcgggtcctgggtgccgttctgttccaggctgctgtagatcagcgccagtttgctgtcgtcatccggttggacgttgagcttggcgaaggtctggtcgcggcgtgcgctgctgtggtcgcggtagccgttggtgtccatgcgcgaagcgtcaagcacgaagccggcgccgttggtcgcgccttcggcgctcaggtggttcttgttcaggccgtcgctgcccaccagggtttcggcgccgatacgcggcgggccttcgccgtctcgggagaacatctggatcacaccgccggcattgctgccatacagggtcgcggcagggccgcgcagcacttcgatgcgttcggcagtgtcgaggttgaacgtggccgcctggccctggccgtccggggtgctggcgggaatgccgtcggcaatcagcttgatgccgcgcacaccgaacgccgagcgggcgccgaagccacgggaggaaatctgcaggtcctgggcatagttctggcggttctgtaccaccaggccgggcacgcgggacagggcctcggaggcgttgatgcccaattggccatcgctgatctgttcgcggctgatgccgtccaccgagtacggcagggcgaaggtcgggctggcgctgcgtgagccggtgaccacgctggggtcgaggaccagcggggcgtcttcagcccgagcggcatcgctcagggcgaacaggccaggcagcagcaaggtgaagcgggcgaggtttttcatcggtcagcgggaatccatggcgcgcataggcggtagacgcgcaaaggggcgcgagtttagtggctcgggcgatttttatcatttgggaatcgtcctacgctgcaaatcaatgttgctgctttgggtcacctgcccttgcgatgttagcgtggtcagccttggcaataacaatggcagatgggccataaggagagggtcatgaggatggggtcgaaagtcttgtgcagtgtgctgccgcttgtgttggcgggctgcggaaccatcaataccgtgttccggccagacgcggttaccagccagaacctcaaggactcgcgcagtcactgcgaaaacgtgccgcgcgtctacagcggggtgatctacgggttctgcacgctcaatggcgaaccggcgcccgacaagagcctgaaggacaacagcctgatcgaccatagcggtagcatgctacccattgtcgcggtggagtttgtcgcctccggcgtcctggacaccctggtactgccctacaccgtttatcgccaaagccaggacggcagcatcgagatcttccgctgatccctcttgacgctcgtcgctaacagcttcccgccgcttttacgctataatcccgccctttagctgtttcccgcccaggcgggaggcacacttttttcaggcgcaacccgcctgcatgcagactaaaagaggctagacccctgtggcattgacgattcttggcctgtccggcgcccttagccatgatccttccgcagccttgtatatcgacggcaagctgatcgcggccgccgaagaagaacgcttcgtacgtgacaaacatgcaaagaaccgcatgccctacgagtcggcgaagttctgcctggagcaggccggcatcaagccctccgacgttgacgtggtcgcgatcccgttcgccccgatcagcctgttcggcgaggcgcgctggcactacgccaagcgttactggtacgccccggaccgcgccctcgatgcgatcctgatgggcaaccgtcgctacaagcgttatcgcaacaagatcgtctggtgcctggagcaactgggcttcgatccgaagaaaatcaagatcgaaccggttgaacaccacctggcccacgcttccagcgcctaccactgctccggcttccaggagaaaaccgcgatcctcggtatcgacggtaaaggtgagtacgccaccacgttcttcggctacggcgaaaacggcaagatccacaagatcaaggaattctacgatccggactccctcggcggcctgtacggcgcgatcaccgagttcctcggtttcgagatgctcgacggtgagttcaaggtcatgggcatggcgccgtatggcgatgccagcaagtacgatttctcgcgcctggcttcgtttgagaacggtgagttggtgatcaacaccgactacgccaacgtcatcggcctgcgccgttacaaagagaagggcaaggggttctacttctcgccaaaactgatcgagtggctgggtcccaagcgcgaaggcgatatcgccgacgagccgtacatccactacgccgccagcatgcaggcgctgttcgagaaactggccctgcagatgatcgaccactacctgggcgacatcctcaaggacaccggcaagctggccttcgccggcggctgcgcgctgaacgtcaagctgaaccagaaaatcattgcgcgtgacgacgtgaaagagctgtttgtgcagccggcgtccggcgatgccggtactgccgtgggggcggcggcctacgtgtcccacgcccggggtgtgccggtggagaagatggaacacgtctacctcggcccgtcctacagcaacgaagacgtgatcgccgcgtgcgccaagcatgagagcaagccgaactggcgcaagatcgagaacatgccccagcgcatcgccaagatcatggtcgatggcaacccggtggcctggttccagggccgcatggagtttggcccgcgtgcactcggcggtcgttcgatcatcggttgcccaagcgccaccggcgtggcggaccgcatcaaccaccagatcaagttccgcgagcgctggaggcctttctgcccgtcgatgctcgacaccgtcgcgccgcagatgatcaaggtcgaccacccggcgccgttcatgaccttcacctttgaagtggccgaagagtggaaaacccgtgtgccggaagtggtccatgaagatggcacctcccgcgcccaggtgctcaagcgcgagtacaacccgcgctactacgacatgatgaaagagctggaagtactgaccggcaacggcgtgtctctgaacacctcgctcaaccgtcgtggcgaagcgatgatctgctcgccgaccgacgcgctgaacatgttcttcggctccgacctgcagtacctgatcatggaagacatcctggtcgtcaaggacggcgtggacccttatgacgccgtggtctaaatgctgaaccgcttccaggcgtggcgtgagcgtggctggacgcctgtcgaggccgaggtttacgcccaggcctggcagcggtttggcggcagcgttgcgacccatccgcagtttgtcgagcgcttggcgggcctggcgcagattccggtgcgttacctgggctgggaacaggacggtgaactccgaggggcgattgccacctgggggcgcgacctggccttgtccaaggacgtactcaagcgcagcggcaagaaaggcctgtttgacctgggcaatgccgagatcatcctgccgatcactgccgatgcgcagttgccggtgcgccatcgcgggcgttacctgtcagcgctgaacgagggccgcatcagcaccctcaagtcccaggccgagcagttggccatggcgcgtacccccgaagacctgtcgaagaagtttcgctacaaccagcgccgcgaattgcgtctgctggaagaggcgggcggcgtggtgcgggcggtgagcgagttttccagtgtggagctggcggcgatctactgcgatctgttccagcgccgctggggctttcccgccacaggcgccgagcgcctggccgaggtgctggcgctgctcaaagagttcctgatcggctcggtgctgtttctcaacgatgctccgattgccgtacagcttgtgtaccgcgtcgaggcgccggagtggatcagcatcgagtacgtcaatggcggtgtcgaccctgaaacccgggcattcagccccggcagtgtgctgagcttcctcaacacccaaagcgcctgggaacaggcgcgggccgtggataaaccgctgcgcttttccttcgggcgtgccgaccgcgagtacaaggagcgctggtgcaacccggtgccggtgttcagcgtatgagccgcaaacagcaactgctcaagcgccaccggcgcaataaacgcattgccctgctgatcgggctgctgctgttgatcgcggccggtgtgctggtggcctggtggttaccactgatcctcgcggttgtgctgtgggtggcccatgaagcctggtttgccgaccacctgttttattcgcccaaggacgactaccaataccgttttgcgtcgagtggccaacaggtcgggctgcgtctggaaggcggcaggttgctggcagagacgccgctcgagctggctggcgatgaaacgctgatcgtcgaagtgcagctcaaaagcaacctatgggggcgtttgtttgatcctgcagttgaatttctggacgatcgccaggcgttcgaacgtggggtggccggcaaacgttacctcaacctcaccggttcggcggcggcattggtcggcggtgaactgcgcctgcgcggtcgtttttgccgcgtgatcggacagccggtcttgtggctgtttcgccagcctgacgtagcccgtcagcgtgtgatggtgatcgccccccatgccgacgatgccgaactggccgccttcggcctgtacagccaggcggatgaaagctggatcgtgaccctgaccgcgggtgagatcgaggccgagcactatcagcaaatgggtttgcccaaggctgaagcggcgcggatcaaagggcgcttgcgtgcctgggacagcattgccgtgccgcgctgggccggcgtgcccgaggcgcactgcgtgcagttggggtatttctgcctgcaactgccggccatgcgtgacgcccccgatcaaccccaggcatcgcgcgaagcgcagttggacgatacgcggctgttccgccagttcaatgctttggcgttgccgggcgatgtagacggtgcgccgacctggaacaacctgattgccgacctgcgtgcagtgttgctcaaggcgcgtcccgaggtgattgtgttgccgacgccagtgctcgaccctcaccctgaccatatctgcgcccacaccgcggtggtgcaggcattgcaggggcttgagtggcagccgaccatgttgcttggctatgccaaccatctgcacgataacgaccgttggcccatgggtgattcaggcgctggcatcgctttgccgccgcagttcgatgccgcccaggtacttgagccctattgccgggtgctcagcctgagccagcagcaggacaaggccatggcgctgggtatgatgcatgatctgcagccccgtgcaccgttcaagcgccgggtgcgtcgcctgttgcagcaatggctggccggccgtggtccatcgccttacggcgagaacgaatttttccgcaaggctgtgcgccgtcacgagctgctttgggtgctgaagcaggactgaaattgacttttttcgtcgggctgcccgcgtgtagcagcccgattgcctcatggagtgatatgaagcctcgtttcaaggttttgcagttgcagcctgactacaacgtcaaactgaatgacttcgccgatctcggcgagcagatcgtcaaggcgctgccgacggagcggttcgaggtgacgtcagccttcctgagcggtcggccgcagccgggccagccgttgagcgtggcggatcattccaagtatttcgagtttcccgagaaggccctcaaaggcattcgcctgggcgccatgtgggaaatctacaagtactgccgtgagcagaaattcgatgtagtcatctgtaaccgcttcaagtcggtgaacatgatgctgtcgctcaatcgctggttgaagattccgttgtgcatcggtatttcccacggtttcggcgagtacgaacgcgcctatcgccggcgccagacgcgccgcctggtcagcccggcctggcaatgtcgagcaactgacagcggccctggacacttatctggccatgagcgacgagcaattgcgcgccaagggtgaacaggtattccgttatctggaagagaaccacgccctggccgagttccagcaaaagtacctgaacctcatcgaaaccggtttgaaagaagtaggtagagcatgacagcgcaacaacccctggtctcggtgatcatcgcgtcctacaaccacggccggtacatcgaggagagcatcctcagcgtgctcggccagacgtacccgaacatcgagctgctggtggtggacgacggttccaaggatgacagtgtcgagcgcatccagcgcctgcaggccgagcacggctttgatttccaggtgcagcagaaccagggcctgaccgccacgctcaacggtgccatcgcccgcgccaagggtagcctgatcgcacccttcggctccgatgacatcatgctgccagaccgtatcgccacccaggtggcctacatggaaggtaaaccgaaggtgggcatgtgcgctggcaatatcgagttgatcgatggtgacggcaacctgcacccggagaaaaagcagcgccgcgacgtaccgtttcgcagcctggatttcgacgacatgttcatggaccgcaagcccttcccgccggcgccgaccatgttgattcgccgcgaagtgctggaagaagtcggcggcttcgacccactgatccctctggaagacctgctgatccaattgaagatcaccgccgcgggctacaccattgacgcgctcggcgtggtgatggcgcagtatcggcagcacgcaagcaacacctacaagaaccatcgctacatgatccagaacattctcaagacctatgcccatttcagcgagcacccggcctatgacgcggtgcgctacaacttcctcaactcgatgttcctgaagacggctgatcgtgaccggccactggcgcgggagatcctcaagcagatcccgctgaagttctgggggcgcaagaccttgcgtggcttggtgcggttgtacctggcgcccctcaggaagtgaggcggcgggaggtatgaaaaaggcgactatcagcagtgatagtcgccttttttatcaggtggcggggctggccaatgccagcacttgctcgcggatcttcgccgtggcgccttggctggcaacggacgcataacctttggccaactgttcgaagtgtgtctcgaacaaccaggcgcggtcctgtgggtagcgctgcatatggcgcaggttgcgctggcgcaacgcgttgcgcagcggcgacgggaagatgcgcaggtcggcaatatcgatcagggcaaactcaccgtcatccatcaacagcacgttacccaggtgcagcgaacggaagtacacaccgcgctcatgcagcttggccatgaactggccgaaacgttcgatcagcgactcacgcaggctgttgtccaggccttgcagggcctggcgcagggtcaggccgggcagtggcgcgtagctgacggcggtgctggcgtcgcgcaggctatagaggcctagaatctgcggcgtagggatgcccagggtgcgcaattgctcggcgttgctggcaaaccgctcggagtaggggttgaagctgcccgaggtgtaccagcggcgcgcacgaaagatcttcaggaagcggccgtcggccaggcgcaggactttcgggcccagcccgtcggcttcgatcacatgggcattgctgcacagctggtcgaaagctgcgggcttgagcgcttgtaccggcatgcgcaacaggctgtgacggcgctgggcgatgctcaggccggcaatgatcgccaacgggatccacagcacgaaccagtgctctttcgggcgtgacaggatgccacccccttcggtcagcccggcgccgatgccataggtcagcagcgatgaagccaggatgaagagtggctgggcgcgttctttcaggcccttgtacagcccccagccgatcatgaagatccacgggataaagccgatgatgccgacgtaatacagcacgcccagggcaaaactgtgcggctcgcgcagctgatagccgtcggacagggtcaggtacagctcggagtcgtagctgtggccgatccatgggtgttctgcgatgcgttgcagtgacatgccccacagttcaaggcgaaatgagctgcctcgttcggtaatggattccgggtatagcaggagcagtccaatggcccccagaaccaggcctgctatcagcaaagccgagcggcggttgcggctgacgaaggtcatccacaggatggtgagtgtcagggctaccagcggtgtgcgcgagcccgtggccagaaccgccgcgagcatgactgccagagccggggcgctgaaccacaggactttcaggcgctgggtggtcatgcagacatacagccagtagacgcagaagaaaccgaatagatgagagctgagcagcggattgtcgagagcgccacgcccaccgatcatgcgcatgcccggttcgaagcctttgacgaacgccaccaagttgcacaggctcaccaccagtgcgattaccgccgcactgaagaagatcggcttgaacagatcgttgcggtaatgcagcaacagcccgcagccaccaaacagcatgaaggtattgagcgggcgcttgaacaggtcggtgtcggcggtgggctcggggctccacagcaggctggtcagggcccaggcggagaagaccaggaaggcgagcgccaggggctcgcgcagtaacgctttcagctcccgggggcgcatgcacaacatgaacagcgtcggtacgctgaacaggatgtagacaattcgatgcagcacgtttcggttggatacgaagaacagtgagctcagcagcaacaacaagccaatgggtaaaatccacagaaccagaaagtcgaaaacgcgatttgagccatagatcagccgcttggagtgcatacaggaaagccattccgtgttgagaagccgaccatcttaaagtagtggctatataatgtcgccggttgaggccaaccggtttgagggtcatgcagggtgcaagtacaacagagaagctgtgctaaagtcagcctcctttttcaaaacgccgcgtgatatgaccgactccagtccgagcgcaagcccttcgagcttgaaaatatacttccgcctgctcagttacgttaagccctacgccggcttgttcgcgctgagtatcgtcggatttctgattttcgcgtcgacccagcccatgctggggtacatcctcaagtacttcgtcgacggcctttccaaccctgaagccgtgctattccctaccgtgccgttccttcgggacctgcaactgctgcaagccgtgccgctgctgatcatcctcatcgcggcctggcagggcctgggttcgttcctgggcaactacctgctggccaaggtttccctgggcctggtccatgacctgcgcgtgcagttgttcaacaacttgctgacgctgcccaaccgctacttcgacaaccacaactccgggcacctgatttctcgcatcaccttcaacgtgaccatggtcacgggggcggcgaccgatgcgatcaaagtggtgattcgtgaaggcatgacagtgatcttcctgttcgcctcgctgctttacatgaactggcgcctgacgctggtgatgattgccatcctgccgttgatcgcagtgatggtgagcacggccagcaagaaattccgcaagcagagcaagaagatccaggtggcgatgggcgacgtgacccacgtggcctccgaaaccatccagggctaccgcgtggtgcgcagcttcgggggtgaggtctacgaggaaaaacgcttcctcaaggccagccagagcaacaccgacaagcaactgcgcatgacccgcaccggggcgatctatacaccggcgctgcaactggtgatttacaccgcgatggcggtgctgatgttcctggtcctttatcttcgcggtgacgcatcggccggtgacatggtggcctacatcaccctggccggcctgctgcccaagccgattcgccagctctcggaagtcagctcgacgatccagaagggcgtggcgggtgccgaaagcatttttgaacagttggatgaagaggtcgaagtcgacaacggcaccatcgagcgcgacaaggtcagcggccgtctcgacgtacgcaacctgaactttacctacccaggcaccgagcgccatgtgctcaaggacatcagcttcaccgccgagcctgggcagatgatcgccctggtcgggcgctcgggcagcgggaagtcgaccctggccagcctgatcccgcgcttctaccaccacgcaagcggcgaaatcctgctggatggtgtcgagatcgaagactacaagctgctcaacctgaggaaacacattgcccaggtgacccagcatgtgaccttgttcagcgacaccgtgaccaacaacatcgcctacggcgacctggcgggtgcgccgcgggcggacgtggaagcggccgcggcggacgccaatgccaaggacttcatcgatcagttgcccaagggcttcgacacccaggttggcgaaaacggcgtgttgctgtccggtggccaacgccagcgcctggcgattgcccgtgccctcctgaagaatgcaccgctgctgattctcgacgaggccacgtcggccctcgacaccgaatccgagcgccacatccaggcggcgctggacaaggtcatgcaaggtcgcaccaccctggtgatcgcgcaccgtttgtccaccatcgagaaggccgacctgatcctggtgatggacgacggtcgaattgtcgagcgtggcacgcacagtgagctgctggcacagaacggctattacgcccgcctgcatgccatgggcctggatgcgccgatttccgcagacattacctgaacctcccggtaggagccggcaagccggctccttgcaaaaccctcccgcaaacctcccgcaaccctgtgctaatatcgcgcccctgttcattttgtatgtgggttgctccatgaagttgtccatgccgcgattcgatcaagcccctgtcttggtggtcggcgatgtcatgctcgaccgttactggcatggtggaacctcacggatttcccctgaggcgccggtgccggtcgtcaaggtcgagcaaatcgaagaccgtccaggtggcgctgccaacgttgccctcaatattgccgccctcggcgccccggcctcgctggtcggcgtgaccggcgacgacgaagccgccgacagcctggccaacagcctgcgcggtgctggcgtgcgtgcgttgttccagcgcattgcccaccagccgaccatcgtcaagctgcgggtgatgagccgtcaccagcaattgctgcgtatcgatttcgaagaacccttcgccaccgacgccctggcccttagcggccaggtcgatcagttgctcgaaggcataaaggtgctggtgttgtccgactacggcaaaggcgccttgaagaatcaccaggaactgatccaggccgccaaggcccggggcatcccggtattggccgatcccaagggcaaggacttctcgatttatcgcggagccagcctgatcacgccgaatctcagcgagttcgaagccatcgtcggcggttgcgccgatgagcacgacctggtgaccaaaggcgcggcactgatggccgacctcgacctcggcgccttgctggtgacccgtggcgagcacggcatgaccctgctgcgccccggccacccggcgatgcacttgccggcacgtgcccgtgaggtgttcgacgtcaccggcgccggcgacaccgtgatttccaccctggccgcctcgattgccgccggtgaagaactgccccacgctgtggccctggccaacctggcggcgggcatcgtggtgggcaagctcggtaccgctgccatcagcgcgcctgagttgcgccgtgcgatccagcgctccgaaggctcggagcggggtgtgctgagcattgagcaattgctgctggcgattgacgatgctcgcgctcacaacgaaagcattgtgttcaccaacggctgcttcgacatcctgcacgccggtcacgtgacctacctggaacaggcccgcgcccaaggcgatcgcctgatcgtcgcggtcaacgatgacgcctcggtcagccgcctgaaaggccctggccgtccgatcaacagcgtcgaccggcgcatggccgtgttggccggtctgggcgctgtggactgggtgatcagcttccctgaagcaaccccggaaaacctgctggcccaggtcaagccggatgtgctggtcaagggcggcgattattccgtcgaccaagtggtcggggcagatatcgtcagcgcctacggtggcaaggtcaaagtgctgggcctggtcgagaacagctcgaccaccgccattgtcgagaagatccgcaacaatgagtaagcaggttcttgtcaccggcggtgcgggctttatcggctcgcacctggtcgatgcgctgctcgccaaaggctacggtgtgcgggtgctggataacctctccaccggcaagcgcactaacctgccgttggacaatccgcgcgtcgaactgctggaaggcgatgtggccgatgccgagctggtcgcccgtgccgctgtcggcgcagccgcggtggtgcatctggcggcggtggcctcggtgcaggcgtcggtggatgatccggtcagcacgcaccagagcaacttcatcggcaccttgaatgtctgcgaagccgtgcgcaaggccggcatcaagcgcgtggtgtatgcctccagcgctgcggtatacggcaacaatggcgaaggcgcttccattgacgaagccaccaccaaggcgccgttgacgccctatgcgtccgacaagttggccggcgagcactacttcgatttctatcgtcgccagcatggcctggagccggtgatcttccgtttcttcaatatcttcgggccacgccaggatccgtcatcgccgtattccggtgtgatcagcatcttcagcgagcgggtgcagcagggcgtaccgattgccgtgtttggcgatggtgagcaaacccgcgacttcatgtacgtgggcgacctggtggacttgttggtgcaggcgattgaagcgcccgaggctcccttgggtgcaatcaatgtcggctggaaccgcaccacgacgctcaaggatgtgctgcaagccttggaagacatcgtcggcaaactgcccgaagtgacttacgggccggcgcgctccggggatatccggcattcgcgggcgaacaaccagcggttactggcgagttttaccctgcccgaacccaccccattgaaggtgggattggaacgcttgctcaaaggctgacgcgatgtgtagcctgattcaggccttggtttttttcttcggcacgatcttgcgcagcaccctttgggccaggcgcttcaatttcgactctttctcaggctcagccaggccttgctggcgcagccagtccttccagcgaatccgctcctcacgcaccaaccagccttcctgctgggcgaagctttccgccaggtacaaaccccgcgtgctcgccgggtacagctggtctttcttgacggtgtagagctcggccaggggctggccgtctttcaatggcatcaggtacaggtccgggcgttgacggtccaggcgggcgaccagttggtcgccttcaaggcgctcgtcgacatggaacaggctcagggatttggcttccttgggcacttccaggcgcaggtcatagatcaattgcaacgaggcggtgggcaggtgcacataggcgcgcgggcgttcgatcaactgggtggtggcgcagcgcaccgggcgagccgcgccggacagcgggctgaggcgaaagggcagggcttcgcggtaatgcagcgcggaggaatagggcgccggcagccaggtgtcgttgaagcgcccgcccagccagccttccggcgtttccagcaggcactcttcggcaatttcctggatggcggtgtgcagcggcaggttcagctcatgggcgggcacgtagccggagatcagtttgagtaccacgtcgccacggtcctggcggcgctggcgcaccagcacccagtaatccttgttttgccaatgcagggtcaggcgcaccgacacgccaaggttggccagctccagggcgaaacgctcggggtctgccacctccaccggcttgcgccgttgcagggtctgggcaaagttgagcggcatgccgacgctctggtagctcaggccttcgggggtggcttcgacgtgtagcggcagtgtcttgaagttgctggggttttttcttatgagcgttcgcggcatgtcggctccttcttgcgacggggtcggccgcgtcggcggcatcagagttgacgaatgacctgggcagcggtcgccacgttatgggccaggtgcagcggattaatggtcccgacaatagcactggcaacgcctgtttgcgcaaacaacaacatgaaactggcgcgaattggatccattccaggctccaggcaaacgtggccgctggccaaggcctttttcaccaggatgcccttgccgtgggccgccgcatattcaatgacggctttctcggcctgttcgttcaaattgtaggtgaccatcgcgcaatcgccctgttccagagccttcacgccaccctcgacggtcttgccggaaaagccgaaaccacggatcttgccttcctgtttcagcgccgccagggtctggtagacctcgcagtcattgaggatatgcaggtcgttaccgtcagagtgcaccagcaccaggtcgataaaatcggtttcaagtcgtttcaagctgcgttcaatcgacattcgggtgtgggccgcgctgaagtcgtggctggacgcgccattctcgaactcttcgccgactttgctgacgatcacccagtctttgcgctggccgcgcagcagcggccccaggcgttcttcgctcatgccgtaggccggcgcggtgtcgatcaggttgatgcccagttcgcgggcctggcgcaacagcatgcgcgcttcgtcgtcgccggggatctggaagccgctggggtatttcaccccttggtcgcggcccagcttgacggtgcccaggcccagtggcgagaccatcaggccggtgctgcccagggggcgatgaaggtcgtgcagggtaggcaggctcatggcaacagttgctcccaggcaggcacgccgatggtgggttttggcagctcgggcagcggctcgtcgacgcttgggcggatgccgtcacgttccaggctgttgatcacccgatcggcgaagtccggtgccaacgccaacttggtcggccagcccaccagcaggcggccttgttcggcgatgaaggcattgtcggggcgggtcaggcccgattgcaggggctcggcgcggtcgacgcgcagggtcgcccattgggtctggctcatgtcgatccacggcagtaactgcgccagctctttttgcgccgtagcgatctgttcctgcggcgtgcgcgccacgccatcggcctcggcaatatcgccgcccatgtaccacacccaattgccatcggcggccgggtgagtggtgacagtgatgcgtggcttggtgccgccgcccaagcagtgggcatacagcggcttgaggccggggcctttggcgatgatcatgtgcaatggacgtttttgcatggctggctggctgatgcccagcgcggtcagcagatcagccgtaccggcgccggcactcaacacgatgcgctgggcgcggatctcgcgaccgtccaccttcaagcccaccaaagcgtcgccctccagcaacggttcgatgtgctggccggcgagcaagccatcaccggccagttgggccaggcgctcaatcaggcttggcacgtcgatgaccagctcggccaggcgatagaccttgcccttgaaacggcggtcttgcagcgccggcggcaaatcgtcgcccttgacttggtcgacacggccgcgcacggccttgctggcgaaaaaactggtgaggttgccggcaagcgtgccgggggaccacaggtaatgcgcctcggataacaagcgcacgccgcgcaggtccagctcgccgttacccgccagtgcttcgcgccagcggcgcggcatatcggcaatggcttcggacgcgccggtgatggcgccatgcagggcgtatttcgcgccgccgtgaatgatcccctgggacttcacgctttgcccgccacccaaggtggcgttttccaccactaccgtggaaaacccctggcggcgcaggcgcgcattcagccagaggccggcaaccccggcgccgacaatcagaacgtcggtggaaataacggatggcatgggcgacctcagtgttcaagacaagaggcgcagtatacaggctgttgaggagtggtcagtgcccggcggttttcgagaacagctggatcaccaccacgcccagcacaatcaggcccatccccagcatcgccggaacatccagcttctgcccgtagataaacaacgccgcgatactgaccatcacaatgcccattccagcccacaccgcgtaggccacgcccaccggtacggagcgcaccaccagcgtcagcatccagaacgccacgccgtagccgacgattaccagcagcaatgggatgggcgtgctccagcccttgatggctttcatggaaacagtggcgatcacttccgagcagatggcgatggccaggtagtagtaggcggcattcatgggtcagtcctcgggtaaagcgatcagtcaaggctggcattctagagtcttgtcagatggggtaaagtcattacctatccgagtcagagatgggttaggtcatgagcgtgcagtgggatctggaacagatgcgcctgtttgtcagcgtcgccgaacagcgttcgttttcagcggtggcgcgccagcagcgcaaggctcagtcggcggtcagcaatgggattgccatgctggaggcggacctgggcgtcagcctgttcgagcgtagcagcggccgccagcctcggctgaccgcagccggcagcgtgctgctggaggaagcgcgcgaagtgctgcgccagtgcgagcggctcaatggccgggcactgtcattgacccgtggcgaggaagcttgcctgcgcctggcccaggatgaagccatgttgttccaaccggtgctcgacagcctggaggcgttggcgggccagtacccattgctggaggtgcagttgtccagcgcggcccagggtgatgtggcgcgcaagctggtggagcgcaaggctgacctgggcctgctgttctatcacgaccagatccccgaagccctggagcggcgcgtggttggcagcgtggagatggtcacggtatgcggggtgaaccacccgttggccaaggaaacctatgtaacgtgccagcacctggcgcagttccgccagttgctgatgtcgacccagaccagtgtctaccccggcagcgaagccgccagcccgctggtgtggcgcgccgacagtttctacgtgttggccgaatggctgatgagtggcctgggctgggcctggctgccccggcatatcgtgcagtacccgacctaccagcaacagatggtcgaactggacagcgaatggacgccgccggcgctggtggtcgagttggtctggcggcgcgacgagcatctggggccggcggcgcgcttcctggccaaacgatttgccgagtgcttgcaggcgatcgactgaaaaagccgataaactccgccgccatgaatagaactctctacagctgtctgttttacctggcgctgcccttggtggctttacgtctgtggctgcgcgcgcgcaaggcgccggcctatgccaagcgcgtcggcgagcgcttctcctatggcttgccggtgatgcggccgggcgggatctgggtgcacgccgtgtcggtgggcgaaagcattgccgctgcgcccatggtgcgcgggttgctggagcgttatccgacgctgccgatcaccgtcacctgcatgacgccgaccgggtccgagcgcatccaggcgttgttcgccaatgaaccgcgaatccagcactgctacttgccgtatgacttgccgtgcgcggccgagcgtttcctggatcgcgtacagcccaagctcgcggtgatcatggaaaccgagctgtggcccaatcatatccacgcctgcgcccagcgcgggattccggtggcattggccaatgcgcggttgtcggcgcgttcggccaagggctatgcgcgctttgccaggctgaccgcgccgatgctgtcggagatgagcctgtttgctgtgcagacgcaaaccgaagcccagcgcttcctggacttgggcgctcggccggaaaccgtcgaagtcaccggctcgatcaagttcgacctgaccatcgatccccagttgccggtacgcgccgccgcgttgcgcgcgcaatggggcgccagcgagcgtccggtgtggatcgccgcgagtacccatgagggtgaagatgaggtggtgctggcggcccatcgccaactgctcgacagctaccctaacgcgctgctgattctggtgccgcgccatcaggagcgcttcggcccgatgttcgagctgtgcgcacagcaaggctttgccacggtgcgtcgctccagtggggaacccgtcaccgcgaacacatcagtattgctcggcgacaccatgggcgagttgctgtttctctatgcgttggctgacagcgctttcgtaggcggcagcctggtggcgaccggtgggcacaacccactggaaccggcggcgctggccttgccggtgatcatgggaccacatgtgttcaacttcctcgaaatcaccgcgatgatgcgtgaagccggggcgttgcgcgcggtggacgatgcagaagggttggccgaagccgtgcgccagttgttcgaactgccgcaggatgcgcgcaagatggcgcaggcggggctcaaggtgatgcaggccaaccagggcgcgttgaagcgtttactggatggtttaggtcgactgctggctgactgaatcatcacctgactcaatgtgggagggggcttgcccccgatggcggtatatcagtcacctatacggtgcctgacactctgctatcgggggcaagccccctcccacatggggttgcagtggattcagttggcggggcgggccttgagttgttcggccgcagccttggccaggtccggcggcaggaagtcgcggtccgggttgtagtcggccttgaggtagcgcgccaggtcttgcagatcgcctgggttcaaggtgcccgcggcctgcttcaagcgcaggttgtcgaggatgtagtcgtagcggctgttgttgtagttgcgcactgacgcatagagctggcgctgggagtcgagcacgtcgacgatattgcgcgtccccacctgatagccgatttccgtggcttccaccgcgctctggttggagatgatcgactggcggcgcgcctgtacctgctccacgtcggtgttcaccgcgcggtgcaggttgcgggtgttttccaccacctggcggcgcaggccttcgcgctgctgctcggtctggcccagacgcgagtaggactcacgcacctgcgagctggtcagcccgccgctgtagatcgggatgctcaggcgcaggccgatggtgcgctgctcgacatctccacggtacggcgtgccgaaggcattcgggttgctgaaaccgagggcgtcgttgtcgcctttttcatattgcgccacggcgtccaaggtcggcgcgtggccggccttgcgctgcttgagggtttcttcggcggccgtgaccgcgtagttgctggccagcaggttcaggttctggcggccggcggtttcgacccaggccttggcgtcgttcggcagcggcggcagcaccggcagcgtgtggacgatgccctggattgagttgtactggcggttggtcagggtgatcagcgcttcgaacgcgtcctcgacctggcgttgggccaggatgcggttggcgcgggcggtgtcgtagctggcctgggattgcagcacgtcggtcttgtccgacaggcccacgtcaaagcgctcgttggactggtccagttggcgcttgaacgcattttcttcggccttggtcgaggccaggttgtcctgggcgcgcagcacggcgaaatagttttcggcgctctgcaggatcaggttctgttcggtcgccgacagttgcaacgcggcctgctcattggtggcctcggcggcttgcagctggaaccagcggtcggcgcggaacagcggctggctaagggtggcgcgccaggagtgcgcatcgcggttggcggtggcggccggggtgtcgatctgggtgcgcacgttgttgatatcggcaccgccggtcaggttcggcagcaagccggcacgggcctggggcaccacttccttttgcgcgccgtactgggcacgggcggcggccaggtcggcgttgttgtccaccgcttcctggtagacgctgaccaagtcggttttggcggacaagggcgcttcagctgcccagaccattccgttggtcgcacaagacacggcaagagccagtgaaagtttgcgcagcatgaggcgatccctagtttgaatattacggtgataatttagcgcccaaggctaaggctggccattcctggcgtcaagcattgtggcggcaaccgagtgtagtggtgctgactcggcgcaacaatcccgcaatcacgccattcatcacgctgaatgcaccgccattggcaatttgcccacggcatggtctagactggccgcgttcttgtcggggtgccttgttggaaggctgagatcggtaaataccggatcccgttgaacctgatcaggttagcgcctgcgtagggaacaagatttctcgtcacccggcgagtcctcttgtgcttcgtccgggatgttgttcgacaatcgaacagccctcgtgcgccaagcacagcactggttccagtgcgtccgtccgtcacaggttcgctccgacaaaaatccaccgcctggataagttggagagcccgtgatgactacaacattaaaaaacaccgtgcatttgagtgaatcggccaaggtcgactccggctccgtgcagccgtttacccgctcgcagaagatctacgtggaaggcacccgcccggacattcgtgtaccgatgcgacaaatcagcctggacgtcacccccaccgatttcggcggtgagatcaacgcgccggtcaccgtgtatgacacctccggcccctacaccgaccccaacgtgatcatcgacgtgcgcaaaggcctgggcgatgtgcgctcgccgtggatcgaagtgcgtggcgacaccgagcgcctgccgggcctcagctcgcacttcggccagcagcgcctcagtgatgccgagctgaccgcgttgcgcttcgcccacgtgaagaacccgcgtcgtgccaaggccggcgccaacgtcacgcagatgcactacgcgcgcaaaggcatcatcaccgccgagatggaatacgtcgccatccgcgagaacatgaagctcgaagaagcccgcgccagtggcctgctcgaccagcagcacgccgggcacagctttggcgccagcgtgccgaagatcatcaccccggaattcgtgcgcgaagaaatcgcccgcggccgcgccatcatcccggccaacatcaaccacaccgaactggaaccgatgatcatcggccgtaacttcctggtgaagatcaacggcaacatcggcaacagcgccctgggttcgtccatcgaagaagaagtggccaaactgacctggggcattcgctggggttcggacacggtgatggacctgtccaccggcaagcacatccacgaaacccgtgagtggatcatccgcaactcgccggtgccgattggcaccgtgccgatctaccaagccctggagaaagtcggcggcgccgccgaagacctgacctgggagctgttccgcgacaccctgatcgaacaggccgagcagggcgtcgactacttcaccatccacgccggtgtattgctgcgctatgtgccgctgaccgccaagcgcgttaccggcatcgtgtcccgtggcggctcgatcatggccaagtggtgcctggcgcaccacaaagagaacttcacctacacgcatttcgacgaaatctgcgaaatcatgaaggcctacgacgtcagcttctcccttggcgatggcctgcgcccgggttcgattgccgacgcgaacgacgccgcgcaattcggcgagctggaaaccctcggcgaactgaccaagaccgcctggaagcacgacgtgcaaaccatgatcgaaggccctggccacgtgccgatgcagttgatcaaggagaacatggacaagcagctcgagtgctgcgacgaggcgccgttctacaccctcggcccgctgaccaccgacatcgcgccaggttacgaccacatcacctccggcatcggcgcggcgatgatcggctggttcggttgcgccatgctctgctacgtcacgcccaaggagcacctgggcctgccgaacaaggatgacgtgaagaccgggatcatcacctacaagatcgccgcccacgcggcggacctcgccaaaggccatccgggcgcgcagatccgcgataacgccttgagcaaggcgcgtttcgaattccgctgggaggaccagttcaacctcggcctggaccctgacaccgcgcgttcctatcacgacgaaaccctgccgaaggattcggccaaggtcgcgcacttctgctcgatgtgcgggccgaagttctgctcgatgaagatcacccaggaagtgcgtgagtacgcagccaaccagcgcattgaagcggtggatgtggatgtggccaagggcctggccgagcaggcggagcggttcaagcaggaaggcagccagctctacaagaaggtctgattcaagacgtctgtaccggccttatcgggggcaagccccctcccacatgactcaaactgtgggagggggcttgcccccgatagcgatccagcaaacaacaaatgcccctcagagataacacccttgagcattcaaccgagtacttactcccccgatatcgcagtgccgagcgacaaaagagtcttcggcgcccgcgacctgttctccctgtggttctccctcggcatcggcctgatggtcctgcagaccggcgcgttgctggcgccgggcctgggcttgtccggttcgttgctggcgattttcctcggcaccctggtcggcgtcctgctgctggccgctgtcggcgtgatcggcagcgacaccggcctgtccgccatggccgcgctcaagctgagcctgggtgccaggggcgccagcctgccggcgctgctcaacctgctgcaactgatcggctggggctcgtttgaaatcatcgtgatgcgcgacgccgccagcctgttgggcgcgcgggcgttcagcgacggcagcctgttggccagtccattattgtggacgctgttctttggtggcctggcgaccttgctggcggtcagtggcccgctgacgtttgtgcgccaggtcctgcgcaaatggggcatttggctgctgctcgccgcctgcctgtggctgacctggaacctgttcgcaaaagccgacctcgccgtactctgggccaaggccggtgacggttcgatgccgttcgcggtgggctttgatatcgcgattgccatgccgctgtcatggctgccgctgatcgccgattactcgcgcttcggcaagcgcgcccaaagcgtgttcggcggcacggcgctggggttctttatcggtaatttctggctgatgagcctgggcgtggcctacaccctggcgtttgcgccgagcggcgaggtgaatgcgctgttgctggcgttggccggggctggcctggggattccgctgctgctgatcctgctggatgagtcggaaaacgcctttgccgatattcactcggcggcggtttccagcggcatgctgttgcgcttgaaggtcgagcacctggcgctggccatcggtgtgatctgcacgttcatcgcctgctttgcaccgttggcccaataccagaacttcctgttgctgatcggctcggtattcgcgccgctgttcggcgtggtgctggtggatcacttcatcctgcggcgccgtggtcagggtactgtcgccaacctgcgttggccggcgctgctggcgtggttgggtggcgtcgtgacgtatcacctgttggccaatctgtatccggacatcggcgcgaccctgccggcgctggtgctggcagggctgttgcagttaattctggctaaagccttcagcggcgtgcaggcaccagctcaggctggatgatgccgtccaggcgtgaatagggaatctgcaattcgacgtggcccagggcgtacggcgcgatggttttggtagggtacttgaggatcacgccaccataggtcagcgccacgttcggggttttctggaaggggtaggtcttcacatactccggctccaggctcaggcgggtgctgatcagccagctgttgtgggccacctgggcggctttccagaacgcgtcttccttgccgggcagcagcatgtcggtcagggtcagggccttttgccgctggcgcgaatagttgatgaatgcgcggcccggctcgccgtgggtggcgccctggtccaggtagctggacaattcgatgatcaccaagccgtcatgctgttcacgtaccttggcctgcaaatacatgctgttgcggggggcggcggttttgaggaattgctcgcgataggtctccaggctggtcggcaggggatcgctttgggtcatttccagcaggcgctgttcaatcaatgcgtccagcttggggtccttggcaaagtgcacggtgtcgatattcaccagcgggcaatcggcgctggcgcagcccggcttgctttgctcggtggcgtcgcgggtggcttccagcggagctttgtagcttggctggaacaggctctggcacgcgccgagggtcaatgcgatacaggccacggaggcgatttttaaaagcgacatgtaagtccttcgtctatcgataagagcgaaatttgtgcagcttcgactgccagcacggcagtcagttcgccactaagctgattagagtgtgtttgacgcccgccgtctatcccggcaactggaaaggggctgcatccagaggcatgagcgcgttaggatggcgccaattgcgcaggctcaacgaggaagggacatgacggattcagcaaaatcgacgccgagcacaatcgagattgttcagcgcgacaatgcctaccagggcttctacaagcttgatcgcgtacaactgcgccatgagaagttcgatggcggcatgagccgggtgatcaaccgcgaagtttttgttcgtcatgatgccgtgtgcgtgctgccctacgacccgcagcgcgatgaagtggtgctgatcgagcagttccgcgtcggcgccatggggcgtaccgacaacccgtggctggtggagatggtcgccggcctgatcgacaaggatgaagagccggaggaggttgcacaccgcgaagccgaggaggaagctgggctgacattctccgcgctgtggccgatcaccaagtatttcccgtcgcccggcggcagtaccgaatttgtccacttgtacctgggccgttgcgacagctcgggcgcaggcggcgtccatggattggaagaagaagctgaagatatccgcgtcaccgtgtgggccttcgaagatgccctgcaagcggtacgcgacggcaaaatttccaacgcagccagcattatcgccctgcaatggcttgcgcttaatcgcgcggaagtgagggggttatggcagtaaaggcacgggaacgttatcgagtcgacctgatcgggctgcaagccgcctgcgaggccaactatgcgcggctgatgcgcctgctccccgacatgcgccatgcccccgaggcacggcgcattggcgtgacccacggcgaccagatgctcggcgtgctggccctggaagtgatcgtcaattgcccctacaccaccaccctgcgcgtgcgccaggaacacagcctgccttggctgccggtgccgcagttggaagtccaggtgtaccacgacgcgcgcatggccgaagtgatcagcgccgaacatgcgcggcgctttcgcagcatctatccttaccccaacgtgttcatgcaccagcccgatgagaaagcacagctgaatgtgttcctcggtgaatggttgagccactgcctggccctgggccatgagttcgaagccgtgcggtagatgtgaactgcgtccgcttcctgggtttcctctttgtgtcctgccccagcataatcacgccaaacgtccattcctgcgattgccttgggagagcgccttgtcgagcgtatccaccgtgagccacgatgcaccggccttgctggtgcaactgtccgacagccacctgtttgccgaggccgatggcacgttgttgggcatgaacacccgtgacagcctgcaaagggtgatcgagttggtgcgtgcgcagcagccacgcattgatctggtgttggccaccggggatctttcccaggacggcacactggagtcgtatcagcagtttcgcgatatgacggcgcccatcggcgccccgacgcgctggattcccggcaatcacgacgagccgcaggtcatggcccacgccgcggtgcacagcgatttgctggagccggtggtcgatgtcggccagtggcgcatcaccctgctggactccgccgtacccggttcggtgcccggttacttgcaggacagccaattgcaactgctcgcccaggccctgagcgaggcgccaaaccgtcaccacctggtgtgcttccaccatcatccggtgtccatcggttgcgcctggatggaacccattggcctgcgcaacccggaggccctgtttgccgtgctcgaccgtttcccacaggtaagggcggtactgtgggggcatgtgcaccaggaaatcgaccgcgagcgcaacggcgtgcgcctgctggcgtcgccgtccacctgcatccagttcgcgccgggcagtgaggatttcaaggtcagtgagcaagcgccgggctaccgctggctgcgcctgcatgccgacggacggttggagaccggggtagagcgggtccagggcttcgaatttaccgtggactacggcagcaacggctattaactgtgggagggggcttgcccccgatggtggtggatcagtcacatctacagtgcctgacactccgctatcgggggcaagccccctcccacattggatcttcggtgtattgaaggccgaggtcatcacacacggccccgatccctgtaaactgcggctctttggctgagtcacggagagcccggcatgtccgcttcgatcctgtatatccacggtttcaacagtgcgcccgcgtccaacaaggccactcagttgatcaccgtgatgggcgtcatcggcctggctgatcaactgcgtgtaccggccctgcaccaccatccccgtcaggcgattcctcaactggaagccgcgattgccgaactgggtcggccactgctggtcggcagctcactcggcggctactatgcaacccatcttgccgaacgccatggcctcaaggcattgctggtaaacccggcggtcagtccccatcggatgttcgacggttacctgggcacccagaagaacctctacaccgatgaaacctgggaactcacccacgaccacgtgacggccctggccgagctggaagtaccggcgccccaggacgccgcgcggtatcaggtgtggttgcagaccggggatgaaaccctggactatcgtctcgcccagcagtattaccgagcctgtgccttgcgcatccaggccggcggcgaccatggttaccaggggttcgcccggcaattaccggcaatgttgagctttgccggcattggcgcagatcagtatcaatccttcgactttgctgcactgtaaagtcgcaggtcattttttaatcgaacgactcacgacgagaccccatggccactcccagcgctagctcttataacgccgacgccatcgaagtcctctcgggcctcgacccggtgcgcaaacgccccggcatgtacaccgacaccagtcggccgaaccaccttgcccaggaagtcatcgacaacagtgtcgacgaagccttggccgggcacgccaagtcggtgcatgtcattcttcacgctgaccactccctggaagtgtccgacgatggtcgcggcatgccggtggacatccacccggaagagggcgtgtcgggcgtcgagctgatcctcaccaagctccatgcgggtggcaagttctccaacaagaactaccagttctccggtggtctgcacggtgtgggtatttccgtggtcaacgccttgtccacgctggtgcgggtcaaggtcaagcgtgacggcaacgagtaccagatgaccttcgccgatggctacaaagccaccgacctggaagtgatcggcaccgttggcaagcgcaacaccggcaccagcgtgtacttcgcgccggacccgaaatacttcgattcgccgaaattctccatcagccgcctcaagcatgtgctcaaggccaaggccgtgctgtgccctggcctgctggtgacctttgaagacaaaggcaccggcgagaaggtcgagtggcattacgaagacggcctgcgttcgtacctggaagactccgtcagtgacttcgaacgcctacccaacgagccgttctgcggcagcctggccggtaataaagaagccgtggactgggcgctgctgtggttgcctgagggtggcgacagcgtgcaggaaagctacgtcaacctgatccccacggctcagggcggcacccacgtcaacggtttgcgtcagggcctgctcgatgccatgcgcgaattctgcgaatatcgcagcctgctgccacgcggcgtgaagctggcgccggaagacgtgtgggagcgcattgcgttcgtgctgtcgatgaagatgcaagagccgcaattctccggccagaccaaagagcgcctgtcctcccgtgaagcggcggcgtttgtctccggtgtggtcaaggatgcgttcagcctgtggctcaacgaacaccctgaactcggcctggccctcgccgaattggcgatcaacaacgccggccgtcgcttgaaggccagcaagaaggtcgagcgcaagcgcatcacccagggcccggcacttccaggcaaactggccgattgcgccggacaggacccgatgcgctccgagctgttcctggtggaaggtgactccgccggcggttccgccaagcaagcgcgggacaaggaattccaggcgatcctgccgttgcgcggcaagatcctcaacacctgggaagtcgatggcagcgaagtccttgccagccaggaagtgcacaacatcgccgtggccattggtgtagacccgggcgcagcggacatgagccagttgcgctacggcaagatctgcatcctcgccgacgccgactccgatggtttgcacattgccacgctgctctgcgcgttgttcgtgcagcacttccgcccgctggtggatgctggccacgtctacgtcgccatgccgccgctgtaccggatcgacctgggcaaggagattttctacgccctggacgaagccgagcgcgatggcattctcgaccgcctggtagccgagaaaaaacgcggcaaaccgcaggtcacgcgattcaaaggcctgggtgaaatgaacccgccgcaactgcgcgagaccaccatggacccgaacacccggcgcctggtgcaactgaccttggatgacttcgccgccacctcggaaatgatggacatgctgctggcgaagaaacgcgcgccggatcgcaagtcctggctggaatccaaaggcaacctggccgaggttctgggctgatgcgcacaggtttcgccctggcgatcctgatgttgagcagtttggcggccacccagttggctgccgcgcctgcggccgagctcaagctggtgtccgaacacccggtggatggcatgcgtggcggcaacctgtcgggcctggcgttgtgcggcaacgagttgtggacggtttccgaccgtgatgacgaccagatctaccgcctggacatcagcgcaccgacctggaaggctgaaacggtaaagatcgacgtgccaccggtgcccgagtccggcttgccgtgggggttgcgttcacgtaccaaggccgcgtctttcattcgcggtggcgacctggattttgaagggatcacctgcgatgccgccggtaaccgctacattgtcagcgaagcccatgcggcggtgctgcaagtgccggtgacgggcgcgcctgagtggttgaagatcgcacccagcatggtgcgtgaagcgcgggccagcggtatgttgctgcacttcaatgcattgtttgaaggcctggcgatcaaccccgaaggcaaccagatctggctggcggctgagcgtgaacggcgtggcctgatttccatcaagcgtccgcaaagcctgtgggactgtgacggcccctgcgtcttgctgagcgaagccggccaggaagtgcaaccagcccagttcccgaacgccaaggcggtgtccaaggattttgccgatctggcgctgttcaacggcaagctgtttaccctggaacgcaatgcgttccagatttgccggcgtgacgcgattacggccaaggttgagctgtgctggtcgtttgccgacgagaccctgacgcctgagcggcgttacccccagccttatggcctggcggaagctctggtggtggatgccgacggtgcctggctgggcatcgacaacaatttcggcccgcgtgccgatggtgaaaaacgccccatggtctatcgttttgccgcccctgccggtggctggagcgccaagccatgagccgatatttttttgaattgacccggcgccgtggcatttccgctgcgccatacccaagcatgatgaggcccgcatgagtgacatcctcgcagacagcttagacggcgtagaacgccggtcgctggctgacttcaccgaaaatgcctacctcaactactccatgtacgtgatcatggaccgtgccttgccgcatatcggcgacggcctgaagcccgtacaacggcgcatcatctatgccatgagtgagttgggcctggacgccgattccaagcacaagaaatcggcgcgtaccgtcggtgacgtactcggtaagttccacccccacggcgactcggcgtgctacgaagccatggtgctgatggcccaaccgttcagctatcgctacacactggtggacggccagggtaactggggtgcgccagatgatcccaagtccttcgcagccatgcgatacaccgaagcgcgcctctcgcgttactctgaagtcttgctgagcgaactggggcagggcaccgccgactgggggccgaatttcgacggaaccctcgacgaaccgctggtgttgccggcacgtttgccgaatatcctgctcaatggcaccaccggtattgcggtgggcatggccactgacgtaccgccgcacaacctgcgtgaggtcgccacggcctgcgtacgtttgctggatgagcccaaagccacggtggagcagctctgcgagcatatccagggcccggactatccgaccgaagcggaaatcatcacaccgcgcgccgacctgctgaaaatgtacgaaaccggcaagggctcggtacgcatgcgcgccgtgtaccacatcgaggatggcgacattatcgtcactgcgctgccgcaccaggtgtccggcgccaaggtgctggagcagatcgccgcgctgatgcaggccaaaccgtcgaaactgccgcaggttgccgacctgcgtgacgaatccgaccacgaaaacccctgccgcatcgtgatcatcccgaccaacagccgggtcgaccacgaagtgttgatgcagcatctgtttgccagcacggacctggagtccagctatcgggtcaacgtcaacatcatcggcctggacggcaagccgcagttgaagaacctgcgcaacctgctggtggagtggctggagttccgggtgcagaccgtgcgtcgccgcctgcaattccgcctcgataaggtcgagcgccgcctgcacctgttggacggcttgctgatcgcctacctcaatctggatgaagtgatccacatcatccgtaccgccgagcacccgaaagccgagctgatcgcgcggtttgagctgagcgagatccaggcggactacatcctcgacacccgcttgcgtcaattggcgcgactggaagaaatgaaactgcgcgacgaacaggacgcgctgctcaaggaacaagccaagctgcaagctctgctgggcagcgaagccaagctgaaaaagctggtgcgcagcgagctgatcaaagacgccgaaacctacggcgacgaccgtcgttcgccaattgtgcagcgtgccgaggcgaaagccctgacagaaaccgagctgctgccaaacgagaaaattacggtcgttctgtcggaaaagggttgggttcgatccgccaaggggcatgatattgacgccaccggtttgtcgtacaaggccggcgacgggttcaagaccgctgcggccgggcgttccaaccagtttgcggtgtttatcgactccaccgggcgcagttattcggtgccggctcacaccttgccatccgcacgggggcagggcgagccgttgaccgggcgcctgacgccgccacctggggcgaatttcgaatgtgtgctgctgccggacgatgatgcgctatacgtgatcgcgtccgacgcgggttatgggttcgtggtcaagggtgaagacctgcaggccaagaacaaggcgggcaaggctttgctgagcttgcccaacaacgccaaggtgatcctgccgcggccggtggatgatcgtgaaagcaactggctggcgtcggtgaccaccgaagggcgcctgctggtgttcaagatcagcgacctgccgcagctgggcaaaggtaaaggcaacaagatcatcggtattcccggcgagcgggtggccagtcgcgaagagtacgtgaccgacatcgcggtgatcccggaaggcgcgaccctggtgcttcaagccggcaagcgcaccttgtcgctgcgtcctgatgacctggagcattacaagggtgaacgtggtcggcgtggcaacaaactgcctcgaggcttccagcgagtggatgccctgctggtagaagcgccggtttaacgcgttttagagctctcgatctacgatttaacgcgtagatcgacgctttggcgctggagtcatggcgcatattcacggatgatatggcctttccagcgccggcgtggccgagcgtgtttaggttatttttagtattacattgtggtttgccttgtggcagccacctggatgggatgatgactgctccacgccttccttttattttcatgctcgctggccttttggggttggcgggttgcagcacccatcaaccggtgtcgctgtaccagctggacagcggaagtccggctcaacctgcacagaccgccggcatggccgttttgctcggcccggtggtcgtagccgactacctgcaacgcgaaaccctcctgcaacgtcagaacgatggaagcctgcaaggttccaccgatggtcgttgggcggggagtttgtcctctgatatcaaccagttgatgttgcgccaggtggcgggtcagttggacagccagcgtgtggtcctcgcgcctgcacccaccggttttaccccggatgtgcaggtgttgctgaccattacccggctcgactccggtgcgtcgcaaccggcaatcctcgacgcacaatggcgtttgatcgaccgtcgtggccaggtgcgcgataaccgcatcgtgcatttgcaggaacagcacaccggctccactgcgtcccaggtccaggcccagggcgtgctgttgcagcatttggcgcagcagttgtcggtggcgctcaagccattggccaaccagccgccgattgccgaagcgccgcgcaagcagagcgccccggcgcaggccaagccggccgctccggaaaagccgaagatgccaatggcgacgccgatccgtacggatatggaagtgttcaggttctgatctgaatcgcgcacaaacaaaaggcccgctgagtaagcgggcctttttgtttgtgcgcaatttgagccaggctgcggacccaatgtgggagggggcttgcccccgatagcggtagttcagttaatgatgtgttaactgatactcggctatcgggggcaagccccctcccacatgagtcctaccgttttatttggtgcgggtctcatgcatccgcgccaactgccgctccagcatcgacggatagggctccatcaaccgctccacacaactggcaccctcagggctggcaatcgggcggatacgtgcgcgttggcggatcagcgtgtcttcactgatcttgcgctccaccagcagcaggttgcggctgtgttgggacaaggccagggcatcctgggcgatctcggtgagcaacaggtcgatctggcttatgccgaacagatcgtcgcccactgtcaggccaagctgcagttgcagggtaatgccgctgtctgccacttcgatctgcagttcatgacccagggcgcgcagcagttcgccgcagcaaatggcgttggtcaggtagtcttcaccactgtcttcgctgtggaacagcatcagcgtgctgccatcgttcagagtgtgcagttcgctctggtacaacgaggcggcctggtcgaggcagtcacggtagcgttccagcaattcggtcaggcgtgcgcgtggcaggcgacgcagttgatcctgcgcacccagttgcaccgccagaacggcgctgtactgcggttccgcactctttaccggagccggtttggcggcgacggccggcgcgctggccgaggtgtcgcgcaggtcggcgaacgggtcttcgtcgtccagctcgtcttcttcagctttgaacgcctggcgggtggcaggttttaggcccgctaccggcgcgtctcccacttcaaactcaggctcatcgtcgaactcaggttctggctcaatctcgcgcaccaccggttccggggcgaagctggcgtgaagttggcgagcgaggtcgcctatttcgtcctggcgatcagtggccggggtatgttcgtcgatgtcccgcagccagatgcgcagttgcatcaagggcgtagagatatgccgtcccaggcgcaggctcagggccagggccaatgccagcaggatcgcgctgagaatgcccatgctttgcaggctgatggtcatcggctgctggaattgctgcatgtcgaggctgatgcgcagttggccggccttcacatcctgaaaggtgatattgctcgaatacaggccttcggcctcacccagcaggccgtttttcgggcgttgcccggcttcggccatgatccggttgtccacgctgtagatggcggcgtgggccaccagcgggttcttggtcaggttgttgagcagcacgttgaggctgaggatgtcgttggacaccagcaactcagtcgccgaggtggcggtctgtgtggtcaggctctcgcccagggcgtcggcttgttcgtgcatggcctgtttgaactgcaatcccatcacgcaggcatagatcaccagggccagggcgaccaggatcacgttatggctggcgatgcgtaatgcgatcggtacacggcggtggcgcagtgcccggaagatcagcaggaagaagttatcggtttttactggcgtgggccggttcacttgcgctcggctcttggtccgtgaagttgacgcgcagtatagcgacagccccatgaccggcaaagcgctggctgtgcccgatggtcactgaaagtgggtagaatgcggtttttttccagcctgggggtgcgccttgcgcgaaattgtcctgattaacatcactggggaagaccgcccgggtctgaccgcagccattaccggcgttctggcccagggtggtgtgaacattctcgacatcggccaggcggtgatccacgacaccttgtcgttcggcatcctggtcgaaatcccgagcaccgagcaggcgtcttcggtgctcaaggacatcctgtttacggcgtacaagctggaccaacaggtgcgtttcaccccggtgtccgaagccgattaccagcaatgggtggccggccagggcaaaaaacgccacatcgtcacgctgctgacccgcaaggtcaccgccgagcaactgcagcgtgtcagctccattaccgcgcaatatggcctgaatatcgaccatatcgaccgtttgtcgggtcgtatgccattggacacgccggccgacaagggcaagggctgcatcgagttctccgtgcgcggcgaaccggccgacccgcaggccctgcgtgccgagttcctcagcgtggcccaggagctgaacgtcgatatcgccttccaggaagactcactgttccgccgcaaccgccgcctggcagtgttcgacatggactcgacgctgatcgaggctgaggtcatcgacgagctggccaaggctgcgggtgttggcgagcaggtctcggaaatcaccgagcgcgccatggccggtgaactcgacttccgcgccagcttcaaggagcgcctggcgctgctcaagggcctggacgtgagcgtgctggacgccatcggcgcttccctgcgcctgaccgaaggtgcagagaccctgttcgccgagctcaagcgcctcggttacaagaccgccatcctgtcgggcggcttcacctatttcgccaagcaattgcaggctaaattaggcatcgactatgtgttcgccaatgagctggaagtggtggatggcaaggtgaccggtgtggcggtggagccgattgtcgacgcccagcgcaaagccgatctgctgaaggaattggcccacaaggaagggttgcgtctggagcagactattgcggtcggcgacggtgcgaatgacttgccgatgttggcaatcgcggggttgggcgtggcgttccgggccaaaccgttggtgaagcagtcggccaagcaggcgatttcgacattggggctggacggggtgttgtacctgttgggtttccgcgaccgcgatgggcagctgtaactgaagaaacgcagttcaaaaatgtgggagggggcttgcccccgattgcggtggatcagtcaacaaatctctgactggactgccgctatcgggggcaagccccctcccacatttgaccttcactgaattcaaatcaggctttcggcagtgcgatgccttggcccatctgcaccggcgtacccgccgccagttcttctgcccacttcacctgatccggcccgaacagcacaatcgccgtcgagcccagcttgaagcgacccaactcggcacctttttccaggtggatcggcgcacgtgcagcttcgtcgtagcggaaggttttcagctcacgcttcggcggtgtcaccagcccggcccacacggtttcaatcgacgccacaatcatcgcgcccaccaataccacggccatcgggccgcgttcggtgtcgaagatgcaggcagcgcgctcgttacgtgcaaacaactcgggtacgttttcagcggtggtctggttgaccgaaaagatgcgtccaggaatgtagaccatctcgcgcagcgtaccggccagcggcatgtgcacgcggtggtagtccttcggcgagaggtagatggtggcgaaatcaccgcccatgaacggcgccgctacggctgcatcgccacccagcagttccagcacgctgaagctgtggcctttggcctggaacacgcggccatgttcgatcggacccaactggctgaccgcaccatcggctgggctcagcaccgcgcctgcggtttgatccagcgggcgggcgccgtctttcagggcacgggtgaagaaggcgttgaagtgctcgtaagcggtgacgtcttctaccagggcctgggacatgtccacttgatagcgcttggcaaaccagctggtgaaggcgttcttgaaccaacgcacgcggcactcggcaatgcagccagccaggcgcgacagcaagtggtgcggcagcaagtactggctgaggataaacaactgctttttcataactgtccttaaaccttaaatctcgacgggggtgtcggggtggttgccccattcgccccaggaaccggcataacctttgactcgcggataaccgagcgccttggccaccaggtaggtgaagccagagcggtggtgagtctggcagtgggtgatgatttctttgtcgcgggtcagcccgaggtcttcgaggatctgtggcatgtcacggcggatgcgcaggttgcgcgccttgtccatgccggccgtccattcgaagttcaccgcgccgggaatgtgtccgcctttggcggcgaggaccttctcgccggagtactccagcgggccacgtgcatcccagatgcccaggtcggcagcacccaggcggctttgcaggtattcacgggtagcggtggggccatcatgcagcgtgagactgaccgggccaccgacaggtgcgggcacgtcggtggagaccgggcgttgttcttccagccaggccagcaggccgccatccaggtagtggtatttctggtggccgatcacgtcgagcatccagataaagcgcccggcccagccgccgccttcgtcgtcgtagaccacgtaggtcgcatccggggtatggcccagttcgccgaacagtttttccaggtcggccttggtgggcagcaggccgggtgccggcggctggcccagttgggtgcgtttggggtcaacgaaatgcgcgccggggatatgcccttcggcgtagcgggcggcgctggtgaggtccaccagaatcaggtgctcggcaccgaggcggccttgcaggtcgctggactcgatcaccagcggcaagccagagaagtcaggcatgtgaggtctcctgggcacaaatgttggcgataaaagacggcgattgtagcgcaagcatcaggcgctgcggttggtaaagcagtgcagggctttttcgatgcattgggcggttttgccgaaggcctgcacggtggtttccgagaacggcccgccaccctggtcggccaccatcagcatcaccaccttgccattgcaactcagggagcgcagcagcagatgttcgccggtgaacaggcggcgcaggatcggcggcagcaaggctgagaactgggcatggttctcggggttgagacgcacctgggcggacttttccagcagacgttgcagcagggtgctgttgaccacgtccaggctcaggttggcggcgtccttgggcaggccatcgacctggtgcacgcgcaaggtactcaaggcgcgatcggccatcagcagcatgacccgctgcatgccactggcgaccaaggcctctttggcgcacgtggtcaggtgcatcgcgttggcaaagcggctcggttccaccaagagttcagtgcagcgcttgcgccacacggccagggcctcggcggtgggcggtggcgccggcagcaggccgcgatgaatcttcgccacatgccacggccagatcagcgacagcgccgggtgccagaggtcgggcatcagggtggtacgggcactggtgacggcttgctggtggaccagttgctgcacctcgcccaacggttgttgcaggtacagcgctgtgagcaactgccagcgttcggtgtgcgggcaggtccaggattcctgggccgacatcgccaggccgttggccagcaacacggtattggccggctggttcagccagcgccgcaggttgggttcggcgtcgagcaattgctgatggcgcagtgggtcgtcctcacgggcgatatgcagggccttgaccagcaggcgctgctcgctcatcagcaacttatagccctgggacacccagatcggcaggtgccaggcttcggtcaggccgacgcacaggtcgagcaggcgtatgccgaacagttcctgctcgaccgcgcgggctgactggcccttgtggataacccgcagctcccactcctccagaagcttggggtaggccaccgccatcggccacagtggcgacaggaacaacaggctgccccagtggatgtcctgccacagccgcgccaggcgactgccgaacaaaccgttggcctgctgcgacgcgtgctggctgaccagcaacagttggcgcaatgccacggggatctcgtgtgcgggcaccgagggcaggcgcgccagcaattcttcggcgcgcttgaggcccaggcgattgagcgccacctcgaggttttccgccggttccgccaggctgccatgggtgtggctgttggcctcgcgcatcacgctgagcaccagggccgggctgttttgcatcagctcggcaatatcccgcaacgaactgcggttatcacggatgcctttgcacacgcggtcgtggctggcctggggaacgggcagcagcacatcgtccaggcgcttgatccaagcggcgagagagttgggttttgcagttgggactgtcgtttcattagccatgattggggcgcgatcatcacttgcggtctacacgcccggagcgggccgaactggcttttcgccttaacgggctatagtctggcgcagttttgccgataagtagaacaagagttttctgctacacccaatatgtccatgaacccgacggcgcaagtactcatctcctatggctaaaattatcggcatcatcgtcgtcttcgcaagcgtgctcggcgggtacgtcctgtcccacggtaaaatcgctgcgctgatccagcctttcgaggtgatgatcatcggcggtgcggcactgggtgcattcctgcaggcgaaccccggctacatgaccatgcacgtgatcaagaagtcgctgggcatgttcggttcgcgcttcacccataccttctacctggaggtgttgggcctggtctacgagatcctcaacaagagccgccgcgaaggcatgatggccatcgaggccgacatcgaagacgccgccgccagcccgattttcgccaagtacccggccgtgctcaaagatgagcgcatgaccgcctacatctgtgactacctgcgcatcatgtcctccggcaacatggccccccacgagctggaaggcctgttcgacatggagttgttcagcctcaaggaagagctggagcacccctcccacgcggtgaccggcatcgctgatggtatgccgggtttcggtatcgtcgcggcggtactcggtatcgtggtgaccatggcatccctgggtgagggcgaccaggccgctatcggcatgcacgtgggtgcggcgctggtcggtaccttcttcggtattctcgcggcctatggcttcttcggcccgctggcgacttccctggcccatgacgccaaggaagaagtgaacctgtacgaatcgatcaaggccagcctggttgcttccgcttccggcatgccgccgtcgctggcggtggagttcggccgcaaagtgctgtaccccaagcatcgcccaagcttcgccgagctggaacaagcggttcgcggtcgctaagccatggaaaacaaccagccgataattatcaagcgcgtcaagcgcttcgctgcggggcaccatggtggcgcctggaaaatcgccttcgccgactttgcgacggcgatgatggcgttcttcctggtgctgtggctgatgtccaccgccacgccggaacagaagatcgccattgccggctacttcaaggacccgattggtttctcggaaagcggcacgcccttcgtgatcgacctgggcggctcgccgcagttggcgcctgagcgcaccatcaacccggaggtcaagaccgaagcgcctcaggaaaaaatcccgatcgagcgcgatactgtcgagtctatggccgaacaggtcgagcaggagcgtcttgaactgttgctgcaagaactgcagaccaaggttgaggaaaacccgcaactgttgaagttcaaggatcagatttcattcgagatcaccccggacggcttgcgcatccagatcaccgacgcagccaaccgcccgatgttcgactccggcagtgcgcgcttgaagccgtactttgaagacatcctgctggccatggccgacaccatcaaggcggtgccgaacaagatcagcatcagtggccacaccgacgccaagccttacgcaggccagggtgacttcggtaactgggagctttcggccaaccgcgccaacgctgcacgtcgtgcgctggtggccggcagctacccggacccgcaagtggcgcgcgtggtagggtttgcatcgtcgcagctgtttgaccccaaggacccgttcaaccccatcaaccgccgtatcgatatcgtggtgctgaccaaaaaggcccaacgtgcgatcgaaggtgaccagcccccagcggcgcaacctactccgggggccggcgcgccgggtgaagtaccggccgatccgaacgcgattccgccaggacaggagccgttgccggcgcatgagctgcgtcagaagctgaacctgtttgatgacggtggggtgaaggatcctacggtgcctaagacgggttcttaagcaactaaggtctttttgtggtgagcgggcttgtcccgcgttgggctgcgaagcggccctgatccaaacgccgcatttcttccaggtaaaccgcgtcatcaggcttcggggctgctgcgcagcccaacgcgggacaagcccgctcgccacaatgttgtctgtgcggctcaataactgctttcgggcaagctcgcaataatcgaccgatagctgttcatccgctgttgctgcacgcgcccatcttccagggccttgagcaacgcacagcccggttcgcggtcgtgtttgcagtcgcggaagcggcaggtgccgatcaggtcgttgaattcgataaagcccgcttcgacatcgcagcggctgacgtggccgaggccgaattcgcggatgccgggggagtcgatcaactcgccgccgccggggaagtggaacaaccgtgcggtggtggtggtgtgggtgccctggccggacagttccgacagtgggcctacgcgggtgtcgacttccggcagcaggctgttgaccagcgaagatttacctacgccggactggcccacgaacacgctgatgcgtccgtccaactgctgttgcagctgttccatgccattaccgtgatgcgccgaaacctccagcacggggtagccgagggtgcggtacaccgccagtaacgcgttgagcgccggggcattctgctcgtcgatcaggtcgaatttgttcagcagcaacagcgggcggatgccggcatgctcggccgccaccaggtagcggtcgatcaggttggcatggggctcgggcagtggcgcaaacacgatcacgatcatgtcgacgttggcggctaccggcttgagctggccccggctatccgggcggcgcagttcggtggtgcgcggcagttgggcgacgatcacgccgatgccctggttgccggcacgccacacaaccttgtcgcctgtgaccagcgccggcaggttggcgcgcaagtggcagcggaacacctggcctgcgagttcgccttcgagcgcctcgacttcgacctgcacgccgaagtgcgcgatcaccaggcctgtttgttcagggccgaggtcgccgccctcgagcgcttccacggcggaggattcacgtttggcggcgcgcgcggcgcgttcaccctgaatcttttcgatgcgccagttttggcgacggttgagctggcgtttggccattggtgttccgtgtcgataatgcaaaggttgggtaaaacggtcgcgagtctagcacggccccgcctgctaaactgcgcagctacgccaaggtgccaagagaatcaaaccatgcaaaacccacagaacctgatttggatcgatctggaaatgaccggcctgaaccctgacaccgacgtcatcatcgagatggccaccattgtcaccgacagcaacctcaacaccttggccgaaggtccggtgatcgccatccaccacagcgacgccgtgctcggcaccatggacgagtggaacacccgcacccacggcaactccggcctgacccagcgcgtgcgtgacagccgcgtcagcatggccgaagccgaagccgaaaccatcgccttcctggaaaagtgggtgcccaagggcaagtcgccgatctgcggcaacagcatctgccaggatcgccgcttcctctatacgcatatgaaagcgctggaaagctacttccattaccgtaatctcgacgtatccaccttgaaagaactggctgcccgctgggcgccggaagtgaaggacagcttccataaaggcagcacgcacctggcgctggatgatatccgcgagtcgattgccgagctgcagcattaccgcaagcatttcatcaaggcctgaactccctcaatggtgagccggctcgccacagttttgcaaggatcgccctcatgctgctgatgctctacctcatcgccatcactgccgaagccatgaccggcgcgctgtccgccgggcggcgaggtatggactggtttggtgtggtgctgatcgcctgcgtgacggcgctgggtggcgggtcggtgcgcgatgtgctgctggggcattacccgctgacctgggtcaagcacccggaatacctggtgctgacctccgtcgccgcgctggtgacgatctttatcgcgccgctgatgcgccgcctgcgttcgttgttcctggcattggacgccctgggcctggtggccttcaccctgatcggcagcatgactgccctggaaatgggccatggcatgctggtggcgtcggtcagcggcgtaatcaccggcgttttcggtggcatcctgcgggatatcttctgcaacgacatcccgctgatcttccgccgtgagctgtacgccagcgtgtcgttcctggccgcctggttctacatgctgtgcctttatcttgagctgcccagtgagcaatcgatcctgctgacgctgttcagcggctttctactgcgcttgctggcgatccgtttccactgggaaatgcccaagttcgtctacaacgacgacgtgcactagcgcgtcgcgtgctggttcagcgcccattccacatgttcgcgcaccaggtccgagggatattcccgccgcgccttcaaggcttccagcaccggaatgcttgatggtgcgttgcccaggcccaccgccaggttgcgcaaccagcgctcatagccggcgcggcgcaggggtgaaccttcggtgctgctgaggaatttatcctcgtcccacataaacaactcggccagttcggcgttatccaggttgtggcgtggcttgaaatcgctttcggtggtggcgcgggcgaaacgattccatgggcaaacgatctgacagtcatcgcaaccgaacacgcggttgccgatcaacgggcgcaggtcttcggggatcgcgttcttgagctcgatggtcaggtaggaaatgcagcgccgggcatccagcacgtaggggcctacaaaggcattggtggggcagatgtccaggcacgcggtgcagcgcccgcaatgttcggtgctgtggggggcatcgactggcagcggcaggtcgacaaacaactcgctcaggaagaagtagctgcccgccttgcgattgagcaccagggtgttcttgccgatccagcccagcccggctttttcggcgatggctttttccagcaccggtgcgctgtcgacgaaggcgcggaagccgaacgggccgatctgcgcctggatgcggtcggccagttgctgcacgcgcttgcggatcagcttgtggtaatcgcggcccagggcgtaacgcgagatataggctttttccggtttggccagcagttgcgccatttgtgtgtcgccgggcaggtaatccatgcgcagcgagactacgcgcaaggtgccgggcaccaactcctccggatgggagcgtttgctgccatgggcgcccatgtaatccatctcgccctggtaacccgcgtcgagccagcgttgcaggtgctgttcatgctcggccaggtccaggccgctgatgccgacttgctgaaagcccagctcgcggccccagtctttgatcgattgggcgagggcaggcagatcggtggtgatggcaggcatgagacaagggaaaccgcaggttagataggtataattctgccagacatcggagcttgaagacgcatgccgcagacaaaacacgcaataaccgacgtacaaccgctgttgcacggccatttgccgcaactcgctgcgcgttccccggacgcccataaaggccagttcggccacctgttggtcatcggcggtgaccgtggctttggcggcgccgcgctgctgagtgccgaaagcgccctgcgcagcggcgcgggcatggtgtccctggcgacgcgcctggaacatgtgcccgcggccctggcgcgcctgccggaagtcatgaccgttggggtgagctcggccaatcaattgatgggcctgctggaaaagatctcagtcatcgtgatcggacctggactcggtggtgcgtcctggggcaaaagcctgctttccgtcgccgccaacgccagcctgccgcaggtgtgggacgccgacgcgttgaatcagctcgccatcggcagtgtcactctgccggctgattgcgtgatcaccccgcatccgggggaggcggcgcgcttgttgggcgtgtcgacagccgaggttcaggccgatcgtcttaaggtggcgcgcgcgttgagccagaaattcaacgcagtggctattctcaagggcgcaggcagtttgattgccagcccggacgggcgcgtttcacgctgtgaccaaggccacccggcgatggccacggcagggctgggcgacgtgttggccggcctggtgggtgcactgctggcccaaggcatgcccgcctatgaggcaagctgcctggctgtgtggctgcacgcgacggcgggagatcgccaggggacgttcggtcgcgggttggccgccagtgatctgatccctgccattcgtcaattgctggaggagcagtcaccgtgtctgaagtaattcttttcctggccgatgaagaggccatggttgccttcggccagcgcatcgcccaggtcacggcgggagcggggctgatctttctcgaaggcgacctgggggcgggcaagaccacgctgtcgcgggggatcattcgcgggctgggccacacaggggcggtaaaaagcccgacgttcaccctggtagagccctacgaagtcggcgacgtgcgagcgttccatttcgacctctatcgcctggtcgatcccgaagaactggaatacatggggatccgggattacttcgacgaagatgcgctgtgcctgatcgagtggccagataaaggcacaggctttttgccaaagcctgacctgaccattaccattacgccgcatgagcatggacgtcagttgaagttgttgccccagagcgtgcgcggccagtcgtggtgcgcggctttggcattggaattcaaataattggtggggttaggtatgcgctttcgcgcgttggttgctgtcgtgggggtgttgcttgcggcaatgactgtcaatgctctggctgcttcacaggtgaagagtgttcgcctgtggcgagcgccggataatacgcgcctggtgttcgacctgtctggcccggtccagcacagcgtctttaccctgacgtcgcctgatcgcctggtgatcgatatcaacggcgcgaccctggccgcgccgttgaaagtctccaccaccaataccccgattaccgccatgcgctcggcccaacgcacgccgaccgatttgcgcgtggtcatcgacctgaaaaaggtcgtgaccccgaaaagcttctccctggcgcccaacgcccagtatggcaaccggctggtggtcgacctgttcgacaacgccgccgatgccgcgccgccgcctgcgcccaccccgagcgtggcaacggtgccggcggtgccggtcaacccgtcgcaaccgcaggtcaagctgccaccgccgccaccggccccggccggcaaacgcgacattattgttgtgatcgatgccggtcacggcggcgaagacccgggggcttccggctcgcgcggccagcatgaaaaagacgtggtacttgccatcgcccgcgagctgcagcgccaggtcaatggcatgaaaggctaccgtgccgagctgacccgtaccggcgactacttcattccgctgcgcggccgtaccgaaatcgcccgcaagaaaggcgccgacctgtttgtgtcgatccacgccgacgccgcgccttcggccgctgcctttggcgcttcggtgtttgccctgtcggatcgcggcgctacgtccgagaccgcgcgctggctggccgacagcgaaaaccgttccgacctgatcggcggcgccggcaacgtgtccctcgatgacaaggacaaaatgctcgccggcgtgctgctcgacctgtcgatgaccgcttcgctgacctccagcctgaacgtgggccagaaggtgctgagcaacatcggccgggtcacctcgctgcacaagcagcgtgtggaacaggccgggttcatggtgctgaaatcgccggatatcccctcgatcctggtggaaaccgggtttatctccaactccaacgaggcctcgaaactggccagcgccagtcaccagcaggcgctggcgcgttcgatcagcgccggtatccgccagttcttccagcagaacccgccgccgggcacctatatcgcctggctgcgtgactcggggaaaattgcccagggcccgcgtgaccatcgtgtgcagccgggcgacaccctggccatgctggcggtgcggttccaggtgtcggccgcgaccttgcgcagcgccaacaacctgaaaaccgatgaattgaaagtcggccaggtgttgaccatccccggcactgaattggcggcacaataatgagtgaatcactcctcgacagcggatcgcgcattgagctgctgagcccgcgccttgccaaccagattgccgccggcgaggtggtcgagcgcccggcgtcggtgatcaaggagctgctggaaaacagcatcgactccggcgccaagcgcattgatgtcgatgtggagcagggcggcgtcaagttgttgcgcgtgcgtgacgatggcagcggcatttccgccgatgacctgccgctggctctggcgcgccacgccaccagcaagattcgcgacctggaagaccttgagcgggtcatgagcctgggctttcgcggtgaggcgctggcttccatcagctccgtcgcccgcctgaccctgacctcccgcacccgcggcgccgaacaagcctggcaggtggaaaccgaaggccgcgacatggcacctcgggtgcagccagcggcgcatccggtcggcacttcggtggaggtgcgcgatctgttcttcaacaccccggcgcgacgcaaattcctcaaggctgaaaaaaccgaattcgatcacctgcaggaagtcatcaagcgcctggccctggcccgcttcgatgtagcgttccacctgcgccacaacggcaagaccatcctcagcctgcatgaagccaacgatgacgccgcgcgtgcgcgccgggtgtcggcgatttgtggggcgggcttcctggagcaggcgctgccgattgaaatcgagcgcaatggcttgcggttgtggggctgggtcgggttgccgacgttctcccgtagccaggcagacttgcagtacttctttgtgaacggccgcgcggtacgcgacaagctggtggcccacgcagtgcgccaggcgtatcgcgacgtgctgttcaacgggcgtcacccgacgttcgtgctgttctttgaggtcgacccctcggtggtggacgtcaacgtgcaccccaccaagcacgaagtgcgcttccgtgatggacgcatggtgcatgacttcctctatggcaccttgcaccgcaccctgggtgatgtgcgcccggatgatcaattgtccgcaccgattgtgacggcagtggtccgcccgagtggcccggaggccggtgaattcggccctcagggcgaaatgagcctggcggcgaacctgctgcaatcgccgcagtcgcagccgtcgtacaccgcgccgaatgccggctccggctcgggttatcagtaccaatacaccccgcgcccgcaatcggcggtgccggtggccgaagcccaggctgcgtatcgcgagttttttgcaccgctgccgggggctgagccgggggcgccggtcgccttaccggagggcggtggtgatattccaccgctgggttatgcgttggcgcagctcaagggcatctatatcctggcggagaacgcccacggcctggtgctggtggacatgcacgccgcccacgagcggatcatgtacgagcgcctcaagatcgcgatggccagcgaaggcctcagcgggcagccgctgctggtaccggaatccctggcagtcagccagcgtgaggccgattgcgccgaagagcatcacagcgtgttccagaagctgggctttgaattgcaacgcctgggcccggaaaccctggccatccgccagattcccgcgctgctcaagcaggctgaggccaaccggctggtggcagacgtgctggcagacctgatggagtacggcaccagtgaccgcatccaggcgcacatcaacgagctgctcggcaccatggcctgtcacggcgccatccgtgccaaccgccgcctggccctgccggaaatgaacggcttgctgcgcgatatggaaaacaccgagcgcagcgggcaatgcaaccatggccgaccgacctggacccagatgggcctggacgatctggacaaactgttcctgcgcggccgttgatgagtgccttgccccccgcgatcttcctgatgggccccacggccgccggcaagaccgacctggccatcgaactgaccaaggtgctgccgtgcgagctgatcagtgtcgactctgccctggttttccgggacatggacatcggcaccgccaagccttcgaaagagctgctggcccagcatccacaccggctgatcgacatcatcgacccgtccgagagctattcggctgcagattttcgcaccgatgcactcgccgccatggccgacatcaccgcgcggggcaatattccgctgctggtgggcggtacgatgctctactacaaggcgttgcaggaaggcctggcggacatgccgccggccgacgcccaggtgcgcgccgagcttgaagaagaggctgcacgccttggctggcaagccctgcacgaccagttggcggcggtcgacccggtctccgccgcacgcattcaccccaacgacccccagcgcctcacccgtgccctggaagtctggcgtgtgagtgggcagaccatgactgaacaccgcctgaaacaaagtgcgcaaagtgctgacgcaggcgcttcgggacagtcacaattgccctatactgtggcgaatctggccatcgctccggcaaatcgccaggtgctgcatgaacgaattgcacaaagattcacaattatgttggaacaggggtttgtggacgaggtcgtagctctgcgttccagaggtgacctgcatccagggttaccttcgatacgtgccgtaggctatcgccaagtctgggatcatctggatggcaagctgacgtcagccgaaatgcaggaacgcggcatcattgccacgcgccaattggcgaaacgccagttcacctggttgcgcagctggagcgatttgcactggctggacagcctggacagcgacaatctgtcacgcgccttgaaatacttgggaacggtctccatattgagctgagtccttgcaattgccgtctatccttgggggtgtgacggccataagctatctattttccgattttttattattgatccttaaaggagtgcggcacatgtcaaaagggcattcgctacaagacccttacttgaatactttacgtaaagagaaagtgggggtttccatctacctggtcaacggtatcaagctgcaaggcacgatcgagtcgttcgaccagttcgtgatcctgctgaaaaacaccgtcagccagatggtctacaagcacgctatctcgacagtcgttccagttcgtccaatccgtctgcctagcgcaacgggtgatgaacagggtgacgttgaggcaggtaacgcctgataggagtctcctttgttctttgagcgccacggtggtggtgagcgagtgatcctcgttcacttggatggacaggaccctgaggcgcgcgaagatccgcaggagtttcaggagttggcaaattcggccggcgccgagaccgttgcgttttttaacgtgccgcgtcatcggccaaccgccaaattcctgattggcagcggcaaggtcgaggaactgcgcgacctggtccacgccgaagaagccgatctggtgatcttcaatcacatcctcacgcccagtcaggaacgtaacctcgaacgtgtcttcgagtgtcgcgtgatcgaccgtaccggtctgattctcgatattttcgcccagcgcgcacgtacccatgaaggcaagctccaggtcgaactggcccagcttgaccacatgagcacccggctggtccgcggctggactcaccttgagcgccagggtggcggtatcggtatgcgtggcccgggtgaaacccagctcgaaaccgaccggcgcctgctgcgggttcgcctgcgccagatcaagggccgcctcgagaaagtgcgcagtcaacgcgagcaatcgcggcggggtcgttcccgcgcggatatcccaaccgtgtccctggtgggttataccaacgccggcaaatccacactgttcaacaacgtgacgaaatcggacgtgtacgcggccgaccaactgttcgccaccctcgacccgaccctgcgccgtctggaccttgacgacctggggccgattgtcctggccgataccgtgggtttcattcgtcacttgccgcacaagctggtcgaggcatttcggtctacgctcgaagagtcgagcaattccgacttgctcctgcacgtgatcgatgcggccgaaccggatcgtatgttgcagattgaacaggtgatgctggtgctgggcgagattggcgcccaggacttgccgatcctcgaggtctataacaaactcgatttgcttgaaggcgttgagccacaaatccagcgcgatgagaacggcaagccccagcgggtctggctgtcggcgcgtgatggcagtggtctcgagttgcttgaacaagcgattgccgagttgctcggcagcgatttgttcgttggcaccttgcgcttgccccagcgttttgctcgactgcgtgcacagtttttcgagttgggcgcggtacagaaagaagaacacgacgaagaaggtgtcagcttgctggccgttcgattgccgcgctcggagctgaatcggctggtcagccgtgaaggcgtggtaccgacagagttcatcgaacaacacactttgcaataaaagcctcctaaagcggttgtgccgcagtggcaggcattctgtagcattggtcggcgcgccgtgggtgcgtctttgctttatcagatggagagcgctatggcttggaatgagccgggtggcaactcgaataatcaggatccttggggtggtaaacgccgcaataatggcgaccgcaaggggccaccagatctcgacgaggccttccgaaagctgcaggaaagcctgaatgggttgttcggtggtgggaaaaaacgtggtggtgacgacggcggtcgcacaagcaagggcggtggctatggcctgctgggcctgggtcttgtcgtgctggcggccgtttggctgtacagcgccgtttacgtagtggacgagcaggagcaggccgtggtgctgcgcttcggcaagtactacgaaactgttggcccgggcctgaacatctacttcccgccgatcgacaagaagtacatggagaacgtcacgcgtgagcgtgcctacaccaagcagggccagatgctgaccgaagacgagaacatcgtcgaagtgccgctgaccgtgcagtacaagatcagcaacctgcaggacttcgtgctgaacgtcgatcagccggaaatcagcctgcaacacgccaccgaaagtgccctgcgccacgtcgtcggttcgaccgcgatggaccaggtgctgaccgaaggtcgtgaattgatggccagcgagatcaaggaacgcctgcaacggttcctcgatacctatcgcaccggtattaccgtcacccaggtcaacgtacagagcgcagccgcaccgcgcgaagtacaggaagccttcgatgacgtgattcgtgcccgtgaagacgagcagcgttcgcgcaaccaggctgaaacctacgccaacggcgtcgtgccggaagcccgtggtcaggcccagcgcatcctcgaggatgccaacggttaccgcgacgaagtggtctcccgcgccaagggtgaggcggatcgctttaccaagctggttgccgaataccgcaaggcgccggaagtcacgcgtgagcgtctgtacctggacaccatgcaggaagtcttcagcaacaccagcaaggttctcgtgaccggcagcaagggtgggcagaacaacctgctgtacctgccgctggacaagatgatcgaaggtggtcgtagcagcaccagcgcaccgtccaccggttccaatgccgctgccaacgaagcgagcgcccgtgcggccgctgacttgctgcaacagcaaacacgtaccagggagagtcgttgatgagcaataaatcgctgaccgccctgattgtgggcgtcgtcgtggtcatcgctgcctggaactgcttctacatcgtggctcagaccgagcgtgcggtgctgctgcaattcggtcgcgtggtccaggcggatgtccagccgggcctgcatgtgaaagtcccctacgtcaaccaggtgcgcaagttcgacgcccgcctgatgaccctggatgcaccgacacagcgcttcctgaccctggaaaagaaagccgtgatggttgacgcctacgccaagtggcgcgtcaaggatgccgagcgcttctacaccgcgacctccggcctcaagcagattgccgatgagcgtttgtcgcgccgtctggaatcgggcctgcgtgaccagtttggtaagcgcaccctgcacgaggtggtttccggtgagcgtgacgcgctgatggctgacatcacgcgttcgctgaatacgatggctgaaaaagagctgggtatcgaagtggtcgatgttcgggtcaaggccatcgacctgccgaaggaagtgaaccgcagcgtgttcgagcgcatgagcaccgagcgtgagcgtgaagcccgtgagcaccgcgccaagggtaacgaactggctgaaggtatccgtgcggatgctgaccgtcagcgtcgtgtactgttggccgaagcctatcgcgagtctgaagaggcccgtggtgatggcgacgctcaagctgcggcgatctacgccaaggcttatggccaggaccaggagttctacgcgttctaccgtagcctgcgtgcctaccgtgaaagctttgcgaacaaaaccgacgtcatggtgctggacccaagtagcgatttcttccgctacctggaaaaagccaagtaatcagctcgtcactgtgtaggaagcactccgtcgggcggctaaaacgcctggcggggtgatcctttcagaaaacgggtgtatgatgcggcagccgggaaattcccggcttttttgcgtctgcatgtttgattcggcaggcgtgacaggtttttcgaggaaagtgcccgacgaggccgattgcaggccgttcgtcacgtcgctcttgcgcgtggtttatgcaggcggcgcgcattttctgcttcactcaaggctcggccgagggctggccgcccggatcaaaggggaatggcgtaatggcaacggtagaccgctggctgctgccagatggcatcgaagaagtactgccaccggaagctgcgcgcatcgaaatagcgcgtcgccaggtgttggatctgttccagagctggggttacgagtttgtcgtgaccccccatatcgagtacctggaatccctgctgaccggcgcgggccaggacctggatctgcgcaccttcaaggtcatcgacccgcagtcgggccgtcagatgggtttccgcgccgatatcacgccgcaagtggcgcgcatcgatgcgcacaccctgcgccgtgaaggcccgagccgcctgtgctacgccggcagcgtgctgcacgcacagccgcgtgccttgtcgtcttcccgtagcccgatccagttgggcgccgagctgtatggcgatgccagcccgagcagcgacgttgaagtgatcagcttgatgctggccatgctgcaactggccgacgtgccggatgtccacatggacctgggtcatgtcggtatttaccgtggcctggcccgtgcggctggtttgtccggtgaagtggaacaacagctgttcgatgccctgcaacgcaaggccatcgatgaagtgatcgccctcacggctggcgtgcctgccgatctggctgacatgctgcgtgcactggtcaacctgtgcggcggccgtgaagtgctggtggcagcccgtgagcgcctggccaatgcgccggcgccggtactggcggcactggatgacgtgctggcaattgccgagcagttgtcggcgcgcttcccggagctgccgctgtactttgatctgggtgagttgcgcggttaccactaccacaccggcgtggtgttcgcggtgtttgtaccgggtgttggccaggccatcgcccaaggcggtcgttatgacgatatcggcgccgacttcggtcgtgcgcgtccggccaccggtttttccaccgatttgaaaaccctggtgaccctggggcgtgctgaggtcgagctgccgtctggtggcatctggatgcccgacagtacggacgcagcactctggcagcaggtttgccagttgcgcagtgagggtcagcgtgttgtccaggccctgcctggccagccattggccgccgcccgtgaagcggactgcgaccggcaattgattctgcagaacgggctttggcaagtatcgccactggcttcttgagttttcctgccggccatcgccggcaccaagtttgcgcgaatgaggacaagtgttatgggtaagaatgtcgtagtcctgggcacccaatggggtgatgagggcaaaggcaagatcgttgatctgctgaccgaacatgctgccgccgtagtgcgctaccaaggtggccacaacgctggccacaccctggtcatcgatggcgaaaaaaccgttttgcacctgatcccgtcgggcgtactgcgcgaaggcgtgcagtgcctgatcggcaacggcgtagtggttgcaccggacgccctgctgcgtgagatcaccaagctggaagaaaaaggcgtacccgtgcgcgagcgcctgcgtatcagcccgtcttgcccgctgatcctgtccttccacgttgcgctggaccaggcccgtgaaaaggcccgtggcgagctgaagatcggtactaccggtcgcggcatcggcccggcgtacgaagacaaggttgcacgtcgtggcctgcgtgtgggcgacctgctcaacatgccgcgctttgaagacaagctgcgtgaactggtggattaccacaacttcatgctggtcggttactacaaagagccagccatcgagttcgagaaaaccctggccgagtgcaaggaatacgcagagctgctcaagccactcatgctcgacgtaaccgccgagctgcacgacctgcgtcgcgctggcaaagacatcatgttcgaaggcgcacaaggctccctgctggacatcgaccacggtacctacccgtacgtgaccagctccaacaccaccgcaggtggcgttgcgaccggttccggcgttggcccgatgttcctggactacatcctgggcatcaccaaggcttacaccactcgcgtaggttcgggcccgttcccgactgagctgttcgacgacgtcggcgctcacctggccaagcaaggtcacgaattcggcgcgaccaccggccgtgctcgtcgttgtggctggttcgacgccgttatcctgcgtcgcgctatcgatgtgaacagcatctcgggcatctgcctgaccaagctggacgtcctcgacggtctggaaaccatcaacatctgcatcggctataaagatgccgaaggcaaggacgttgctccgaccgacgccgacagctacgtgggcctgcagcctgtgtacgaagaagtgccgggctggaccgaatcgaccgtgggcgccaagaccctggaagagctgccggttaacgcccgtgcctacatcaaacgtgtcgaagagctgatcggtgcgccgattgacattatttcgacaggtccggaccgcaacgaaaccattgttctgcgtcatccgttcgcttaataagctgttgatgtaaaaagcaaagggctccttcgggagccctttgtcgtttctgtcgcctgggcggcacgacccttgctttggttctttctttcgcggtgctatcaaattaatggcacccgtggtggagggattcccgatgtctgccgttctctcattgttacaaagccgtctgttgcggccagtgttcgttaccctaggtatcgctcttttggtgcaagtgctggtggcggtcgccctgacgcgaagcacggtcactgcactggaggcagatctgggcaatcgcctgggtgtcgacagccagaagctgtccggcgaattggcccaggctggcaaggaagtcacgtccagtctcgatagcttgtctacgagcacccgtcagcgtctaaccgcagggctctcgacccgcctgcaggaagagcagaagcaactgcgtgcgaccctggaaaaagacctgaaagactctgccaatgacatggcgcaactgctggcctcggtggcgccccgcgccatgtgggacagcgacgtgccgacgctgtcggagttcgcccggcgcgcccagcgcaatcccaacgtgctgttcgtggtctatgacgacgcggcgggcgagcacctgacgcgctacctgaaccgtgaaaacccgatcaaccaggcgttgttggacaagggcaagggtgatcgtgccctggataaagtgttggatgcggccaaagatgatccttcggtgttctacgtggaggcgtccatcagccccaatggcgtagagatcggcaaggtgcgcatgggggtttcgacggctgcggttgaggctgacctgcaagcgctcgataaacgttttgcggcgctgatcgccagcggggatcaactggtcggcgatagcctcaagggcgcggcggccgacagcgctgccgccatgggcgcccgcttgcaatctgcgcaagccacggccacccagatgacggccaataccacgagcgccgttcaggacgctgctggcaccctgcgctggcgtatcggcatggggctcgcgctggtcggtcttggcgtattgctgttgatcgctgtggtgctgggtcgccgtgtggtcaaccgcttgaagctgctgatcgcggccatggacgatttggcggcgggcgagggtgatctcaccaagcgcgtgcagatcagcagcaaagatgaaatcggcgacatggcttcggcggtcaatcgctttgtggataagttgcagcccatcgtgcgtgaggcgggggatgtggcccagcgtaccggtgtggaaattggtgccatgaccctgcgcaacgcaggtgccgatgcggccgccggcttgcagcgcgatgaagtggccgagagcttgcgcgcactgtcgcaaatggccgatgaggcgcaggccgaaagtcatgcgatgcaggcggcgttgcagcaggtggtggatatccgtcaggccacggacgagaactcgcgcacctcggctgaagtcggcagtttgatcgaggcgctggcggggcaagtccaggccggttccacggtcatcgagcgcctggcccagcaaagcgagcagatcgaggtggtgttgactgtcattcacggcattgccgagcaaaccaacctgttggcactcaacgcggcgatcgaagcggcgcgtgccggcgagaccgggcgcggcttcgcggtggtggcagacgaagtacgggcactggcgagcaagacccaaagctccaccggcgatatccaggcgcatatcgtggcgttgcagcaaggcgcgcgggaggcggtggaaaccatcggcaaggctgggcgtcaggcgaatgagggcttgctggtgctgcgtgacagcgtgcgcttgcagcagacggtgcaggcctcggtggagcaggtgcatgccgcgattggtttggcgacgcgtgcagccgagcaccaggcccagggcgcccatgcggtgcgcggccgggtcgaggtgatccacgcccaggccgagcgtgctgctcaggcggtggtggagactaccgccagtggcaaggtgctggatgggttggcggcgcagttgaaggcgagcctggggcagttcagggcctaggtggatagccagatggacgggcaggctaattagtcttgaatttggctacatactcattcaaatgttctccagggaagcatattggcgctggggggcatcgtctcagtattatggggttagcgatgctgcgatggtgccaatgcgccttttttcaatagttttgccgcaactcgaaaaaggtcgggcatatctaagcgaccgtcattccgccgatacattacacctatctcttcaagcatcttcgagagttcttcctccttatgtgcctcttggtttttaaagggcagaaggtagctgtgacgttttgcgtctgcaactaatgtctttatagttcctgcctttctccatacgtcaaatactgcatgatcatcttgcggcaagagtaggcctgctagaggcgctaggacccccttgatccatgggaattcttgatgcagttggtcgacacgtgtcttagaggcttcacggaggccatgtctgatgccatcaggagttaaaaccttgtctaggggcgcaacaccatatttcgctgccgcattcatcagtcccaggaagcttcttggtgtaacttccgcatgggcgtcagcagtatgtctcaacggccattcgtaggtgctgccttttttgaatgcatagctaccagttcccatatatgggccggagaattcaatcatcaagttcttctgatcttcctcgtcatggatcagagaccaccgccgagtcaagatggatttcctgctgggtttaggtagattattagctgtcagtagcttgttaaacgctttacgagtgtcttccttacttgatgaggctagtcgcgaatacagaaggccatagaggtctgtccaagaccacgccaagcggactgccccagttcggagtttcggaagttctacgaatcgtagtgcatcatcctcaatctggtcaggacgtaaaaaaagtttgacgcgaatagagcggtaggcgcgcatagcccataccacttccaaaagggcctctgtcagcagccgtcgccgcggccatgtgcgtgctacggtatcgagcgcgtcatagacaatcagtaaagtttttccttcgtcacgaagccggtgctcatgatcaatgagcagatcttctcgaagctcccaatccattccagcactgataaatttccccggtctgctactaagctttcctgctgactgagccgctgcacttaaaatagttgcccaccaaaaagctttagcttcatcgagcgcagcggtagcaggtacatatttatcaatcgcttcatgagatatgccatcagggcctccgacgccagtgtatccaaaccgaacaatcagttcagagaggcctagcttgggataagcaatagctgcttccttcagtgtttcagtctgaccaagaacacttgaccaaaaacttttgccgctgccgcgcgatcccacaacaattggaatcattggatccagcgcaacagcgtgtttttctggtgcatagaggtcctcaatttttgccacatgggcgccaaccgcatcattagatacgtcgcctgggaattgagcgacggcgttacgaagtgctcgaaagtcgtcttgggaaagattcatttttattccaggagctgagggatgctattgtttatcttgtctagtagttcctgataggaggagctgtagatgctgttttcgattaggtcgcgttttattaaaggattgaagcttttgtatcgtgagtcgtcgatgattgctaaaggggtgaaataattagggtcttcagctggtagcacatctgcgtcggaaatctcatcgtcccactccaactgatcaaagtcgctgatctcatggttgatctcgttaattgggcttttctggtgaggccctagtccgatagtagtaaacaagctttcgcaacgttctgcaaagtctttgcgaagctccgattctgcgggagctttgccttggataattgtgaatcggcttagccagccaggcaattgctcggcgttagtgaacttagccatatgggatagtagaattctaaagccttgaaaggtttgtggctcatctagtccgaaaaggaatacttccgcccctaaacctaataacgcagaagcagtggtttcgtgaaggccggcacgagcatcgaccaggataacgtcataccgacgcggatcagaaaactggtcgattagtgatgaaatttggtcaagaaccgtaattacttgtccttcgggggtaatgtcctcggcgtaagcccgagcaatttttgctaggacttcagacggattatttattgagcgccgacccaagacaggtataacgtctattcggccgttattaccagtcaatggtgacgggctgactaagtcggccaagaaagtttcgtccagtgctgtaagtccattttcaactaaggcatctagcaagccaaactcagggagcgtgtcatcgttcagaagaatagcgccgagccctggagcctcaatgtccaaatctatagctaaaacttttaagccgcgagcagccaaatccgccgctacaactgcaagcgctgtcgatcgcccaactccgcctttaatgcttgaaaagacgaagcgcggtggcgctgagttaggtggggctggggcgcgtagccaatccgctccaaccagacgtctatctattaggcgaattttccgcccttctatgataagggaagttatcgtgttttcgattaataaatcactgactccatattccgaaatgtcagctaccagttgatcgtctcgggcgtagtgcttaagggacgaccgcagtgatgtcgatagttgctcgatagtcgctggagacaaaatcgagttactaaaaaatgccaatctgccggtggtgtcgcgtaatacgacaccgtcagaaagtgcctcatctccaagctgtctagccactgttgtggcaagtattctaaggctgtcatcgaagtgaacgcgcatcaataaatcctcaggtaccaatagagccaattacgctaacggcctgcgctttccactgatccaacagtctggttgggatttggtttcctttgctgtagcgcatcgttatatcccaatctgaaaaaaagttgtcgttcagaacgtgtctgcgtaaaacagtggcatttctgccttcaagcttgtttctgagtagcgttttcagcgttggaaagtgtgcgaaaaaggggtcattttcacggctcgcgagtggcctgaacccgatttcaagcatcaatgcctttactccgcattcggcagcaattccgtacaagtaaccagcaacatctctgcggttagtagggtctagaatgtcagctgcttccagatgtcgtctcgctgctgctctcatgtctggggcgtaaggcatctatctctaaccttcaaaaaatgaaggaacaatagtcgttcggatggctgaaatccattgtaatttgttactagggaatatgcgcgtttgagggcttagcgactcaggtacatccgggttgtcagcagataaaccggcaaccccgacaccaaaatcaacagcgccgcataaggcgccgccgccgcgaactccacgttcgaggtatgcgcccaaacggctgtggccagggtattcaacccggtcgggctcagcagcaaggtagccgtcaattccttcatcgcatccaggaataccagcgcaaacgcagcacccaatgccgggaagataatcggcaaggtcacccggcaaaacgcgctgaacgacgacgcgcctagagtccgtgccgcctcttccaattgcggcgccgccttgttcagcgccgtacgaatcggtgcctgggccagcggcaaaaacaaaagcgcataagcaatcagcaacaacgccgaggtctggtacagcgctggcacgtaatgcagggcgaaatacaccagactcagtgcgatcaccaggccgggcaaggcgtgcagcaagtaaggcaggcgctcggcccagatcgccagttggcctttgtagcgcaccaccagcagtccgaccggcaccgccagcaccaggcaaagcgcggcgccgccgagcgacagcgccagggaggacagcaacgcctcactgatctcggccagcggaaatgcagccgacgaacctactgccagccaataaccgagcatccccaggggaatgccgctgccgatgatcgccagcgccaggcaatacacctggctcagtggcgcccacttacccaatcgaacctgctccgcatgtcgcgctgcgccctggccaatgcgcacgtgccggcccttgccgcgcacgcgcagctccagccatagcagcgtcaggcacatcaccagcagcaccgccgagagcatcgcggcattcgcattgctgaattccagctcgaactgttggtagatcgcggtggtgaaggtctgcaacccaatgattgacagcgcaccgaactccaccagcatgtgcagcgcgatcagcaatgctccagccagcagcgagggccacaacaacggcaaagtcacgcgaaagaagatgccccagcggttcagtcccagggtacgggccgactcttccagtgcgggatcaagattgcgcagcgttgccgccaccggcaagaacaccagcgggtacttcgacaggctcatcaccaggatcgccccgccgagcccttcgaaactggcgctcaacgacacccaggtaaagctgctgacaaacgccggcaccgcaaacggcaggcacaggatcacaccccagatgcgccgccccggcaggttgctgcgctccagcaaccaagccagggacaggccgatcacgccgcacgctaccgttaccccgaccatcagcgccagggtgttgcgcagtaacccaaacacatacggtcgccacagcagatgcaccgcctccgcccagcccgcttgccaggccttggtgccgacgtacgccagcggcagtaggctcaagccaaccagaaatagcaccggtagcaacagccagatcgacgggcgcttgcgccgcgggctgaaccctgtgcgcagggcgggtagcgatgggttcatcagttcaagccaacgtcacgttccaggtccagggcttcttcggcgttgcccaggtcggccggggtgactttcggcggttgcagttcgctgaaaggcttgagaccgcgattggattccatacccttgcgcagcgggtattcggccgaggtattggtgatcacgcgctggccttcttcactggccatgaatgccaacaattgctgggcttccttggggtgcttgctggatttcagcgcggcggcggaagacacggtgatcaggccaccggcgtcgccattggtgaagtagtgcagttgggaatccagattggtcttttctttcttcagggcgaaccagtagtagttgttcaccagaacggtggccacttcgccgttttcgacggctttcagcgcaaccatgttgttgctgtacaccttgccgaaggcgcgcaggccggtcagccattcttcggcggcttcacgaccgtgcagcttgatgatcgccacagcctgttcctggaacgcgccgctggtcggcacgaagccgaccttgccttgccactcggggccggcaaagtcgagtaccgatttgggtaggtctttttcggcgatcagtttcgggttgaacgccacgacacgggtgcgtgcggttacgcccatccagtcgccatgggcgccaacataatccttgggcaatacgtcgagggtgctggcgtcgatcttggccagcaggccttgctcgccgagtttgttcagcggcggcgattcttcggtgtagatcacgtcggcaggggagcggtcgccttcttcgacgacctggctggccagctggttgctgctgcctttgcgcacgttgacgtggatgccggtcttggcttcgaaggccttggcgagctcgtcgccgacttctttgtgctggccgttgtacagggtcagggagaccttgtcggcggagtaggcggtgggggagagcaaggtcaggccgagcagagtgagggtcaggccacgcagaagggatgtcttgagacgggtatcgcggatggtcatccgaagttttcctcgcttgtgtgcaacaaatcattgcaaggataaacgataaagtttctcaggtgcggatgcaggtggaaatcgacagggaagttttcaaaccccggaaacgaaaaaacccgctttcgcgggtttaatctgaatttggtgcccaggagaagactcgaacttccacgaccttgcgatcaccagcacctgaagctggcgtgtctaccaatttcaccacctgggcattatcaacaacgcttgcgctgttgatggagcgaactatacggagggctttttgatctgtaaacccctgattcaaaaaaataaatcaagttttccgttaaaaatcaaagccttgaaacgaaaaaacccgctttcgcgggtttgatctgaatttggtgcccaggagaagactcgaacttccacgaccgtaaggtcaccagcacctgaagctggcgtgtctaccaatttcaccacctgggcattatcaaacaacgttgccgtcgtcgatggcgcgcactatacggaggggattttaagctgtaaacccccgccacgaaaaaagcctggaaaatttcgccagtggtcgtgcaaggtgcccgttgcgggctgcaaagggctttaaaaggcttgttgacgtctgaaatttcccgtttcaatacgcgtatgccaaactaacccgcatatagacaaggtgaaaactctctaatggccgattggcagtccctcgatcccgaggccgctcgtgaagcggaaaaatatgaaaaccctattcctagccgcgaactgatcctggcgcatctcgccgatcggggttcgcctgctagccgcgagcagttggtcgaagaattcggtctgaccaccgaagaccaactcgaagccctgcgccgccgcctgcgcgccatggagcgcgacgcacaactgatctacacccgccgtggcacttacgcgcctgtggacaagctcgacctgatcctcggtcgcatcgccggtcaccgtgacggcttcggctttctgatcccggacgacggcagcgacgatctgttcatgagcccggcgcaaatgcgcctggtgttcgatggcgaccgtgccctggcgcgcgtttccggtctcgaccgtcgcggtcgccgcgaaggcgtgatcgtcgaagtggtgtcccgtggtcacgagaccatcgttggtcgctacttcgaagaaggcggcatcggttttgtcgtgccggacaaccccaaggtgcagcaggaagtgctgatcaccccgggccgcaacgccaacgccaagatcggccagttcgtcgaggtgaagatcacccactggccgacgccgcgcttccagccgcagggcgatgtgattgaagtggtcggcaactacatggcgccgggcatggaaatcgatgtcgcgctgcgcacctacgatattcctcacgtctggcctgaagccgtcgtgaaagaagcgcgcaagctcaagccggaagtcgaagagaaggacaaagagaagcgcatcgacctgcgcgatctgccgttcgtcaccatcgacggcgaagacgcccgcgacttcgacgatgcggtctactgcgaggccaagccaggcaagctgcgcctgttctccggcggctggaagctgtacgtggcgattgccgacgtctccagctatgtgaagatcggttcggccctggatgccgaggcgcaggtgcgtggcaactcggtgtacttccccgaacgcgtgattccgatgctgcccgaggagttgtccaacggcctgtgctcgctgaacccgaaagtcgaccgtttggccatggtgtgcgagatgactatctcgaaaaccggcgaaatgacggactaccagttctatgaagcggtgatccactcccaggcgcgcctgacctacaacaaggtcagcaccatcctggagcagccgaaaaccagcgaagccaaagccttgcgcggcgagtacggccatgtcgtgccgcacctcaagcagctctatgcgctgtacaaggtattgctgggcgcacgtcatacccgtggcgcgatcgattttgaaacccaggaaacccggattgtcttcggttccgagcgcaagatcgccgcgatcaccccgaccacccgtaacgatgcgcacaagctgatcgaggaatgcatgctggcggccaacgtggccaccgctgaattcctgaagaagcacgagatccctgcgttgtaccgcgtgcacgacggcccgccgccggagcgcctggaaaaactgcgcgcgttcctcggtgaactcggcctgtccctgcacaaaggcaaggacggcccgacgccgaaggattatcaggctctgctggccagcatcaaggatcgtccggattaccacgtgatccagaccgtgatgctgcgctccctgagccaggcggtgtacagcgccgacaaccagggccacttcggcctgaattacgaggcgtacacccacttcacctcgccgatccgtcgttacccggacctgctcacgcaccgcgccatccgcagcgtgatccactccaaacagaacactccgcacgtcaagcgcgccggtgccatgactattccgaaggcacggatctatccgtacgacgaagcggccctggaacagctgggcgagcagtgctccatgagcgagcgccgcgccgacgaagctacccgcgacgtagtgaactggctcaagtgcgagttcatgaaggatcgcgtaggcgaatcgttcccgggtgtgatcacggccgtgaccggctttggtctgtttgtggagctgaccgatatctacgtcgagggcctggtgcacgtcaccgccttgccgggcgactactaccactttgaccctgtgcaccaccgcctggcgggcgagcgtagcggtcgcagcttccgtctgggcgataccgtggaagtgcaggtcatgcgcgtcgatctcgacgagcgcaagatcgacttcggcatgcccgacaagcccgcagaagcgccgggcagccgtaaaaaacgtggcagtgaaaccacggctcccgccagcaaaggcaagggtgctccagctaaggtggctgcagagccagcgcctgccaaggccggtcgccgctcatcgaccaaggaaaaggcccccgaagcctaccgcccaagcgacgcagcggcgaaaaacgccgaactgcgcaagagtcgtgagttgaagcagcagttgctcaacgaagccaaaagcggtggtaaagcggcgtctgggggaaagtcccacggggcggaaaagccgtcgagcaagcccagtaaacaccgtaaaggcccgccaaaagcgggttcggctcccgcgaaaagcggcggctcgcgcaaacctaaggccaagtcatgagtctggaaaaaatctacggcgtccacgccgtggaagcactgctgcgtcaccaccccaagcgcgtcaagcaagtctggctggcggaaggccgcagcgagccgcgcgtacaagcgctggttgaactggccacgcaaaacaaggttgccatcggccaggccgagcgtcgtgaaatggacgtgtgggtagagggcgttcaccagggcgtggtggcggatgtcagcccaagccaggtgtggggcgaggcgatgctcgacgagctgctcgaccgcaccgaaggtgcaccgttgctattggtgctcgacggcgtgaccgacccgcacaacctcggcgcctgcctgcgttcggcggacgctgccggtgcgctggcggtgattgtgcccaaagacaagtcggcgaccctgacgccggtggtgcgtaaggtcgcgtgtggcgcggccgaagtgattccgctggtggccgtgaccaacctggcacgcaccctggagaaactccagcagcgtggcctgtgggtcgtgggtacggcgggggaggccgaggtcagcatttatgaccaggaccttaccggcccgaccatcctgatcatgggcgccgaaggtaaaggcatgcgtcgcctgacccgtgagcactgcgattacctggtgcacctgccgatggccggtagcgtcagcagcctcaacgtgtcggtggctaccggcgtttgcctgttcgaagcccagcgccagcgtggcgcgaaggccaaggccaaaccgaagaagtaatcaaaatgtgggagggggcttgcccccgatagcggtgtgtcagttgcagatgatgtggctgatcctccgtaatcgggggcaagccccctcccacagtcgttttggggtgcttggaagattgttcaaataatcaccaatcaccttgcgcgcatcctcccccttctctacaattgcgccccttgccttcctggcgggcaccgatgtgcctccctgcggcaagatccataagtgtcattcactccttgtctgaccgtttttgagcggcaggctacaacccgtaaggagcattcatgcgtcattacgaaatcatctttttggtccacccggatcaaagcgagcaagtcggcggcatggttgagcgttacaccaagctgatcgaagaagacggcggcaaaatccaccgtctggaagattggggccgtcgtcaactggcctacgcaatcaacaatgttcacaaggctcactacgtgatgctgaacgttgagtgcactggcaaggccctggccgagctggaagacaacttccgctacaacgatgcagtgatccgtaacctggtcatccgtcgcgaagaagccgttaccggccaatccgagatgctcaaggctgaagaaaaccgcagtgagcgccgtgagcgtcgcgaccgtcctgagcacgaaggcgctgatagcgttgatagtgatgacagcgacaacagcgataacgctgacgagtaatccacggaccttttaaggagcctatcaaatggcacgtttcttccgtcgtcgtaaattctgccgcttcaccgctgaagacgtgaaagagatcgattacaaagatctcaacactctgaaagcctacgtatccgagaccggcaaaatcgttccaagccgtatcaccggtaccaaagcacgttatcagcgtcagctggccaccgctatcaagcgcgcccgcttcctggccctgctggcctacaccgacagccacggccgctgagaccgggcagtcgacaagtagtaagggattgaatgcatgcgcgccttagctgagttcatcatgcgcggtcgcgtgcaggccactctggtagtggctggatgtgcagcattgccgttgttgtattggttgggtgctgccgcaggttgccttgtgctgctgcggcgcggtttgcaggatgcccttggcgtcctggccctgggagtgctggccgccttgatctggtggctgcaactgggcgaacccaaggtacttctggtgttgctggggtcgtcgagccttgcgttggttttgcgcgcaagtgagtcctgggcccgcacgctgctggtcagcgtggcagtggggttggtgttttcggtgttgatcgacgcggctttccgcccgcagatcgaggcgctgtcgcaagagatcgtcaagatcctgccgatggccctcggggaactctaccagcagctttcggtagatgagcgagcgcgtcttgcgacactgattgcaccggccctgatcggcctgatggcggtaatgatgcagatcgtcagcgtgctgagcctgatgcttgggcgttattggcaggcgttgttgtacaacccgggtggttttggtcgcgagtttcgcagtatcagaatccccgtgggcccggcgatgttgctgctggcactcatggtggtcggaccgtacttcggttcacaagccaccttgctggtgctgttttgcagcgtaccgctggtgttcgccggactggccctgattcacgggctggtcgcgcagaagcgcctggccaagttctggctggtggggatgtacgtaacaatggtgctgttcatgcagctgatctatccgttactcgtggttctggccattgtcgacggcctgattgattttcgcggtcgtctggcgccgaaagacgccgataacgcgaacggtgaaggttaaaagttagaggattttcacatgcaactgatccttctggaaaaagtcgccaacctgggcaacctgggcgacaaagtgaacgttaaggccggctacggtcgtaactacctgctgccatacggcaaagccaccgctgcaaccgctgccaacctggctgcgtttgaagagcgtcgtgccgagctggaaaaagccgcagcagacaaaaaagcttcggccgaaactcgcgctgcccaactggctgagctggaagtgactatcactgccaccgccggtgacgaaggcaagctgttcggttcgatcggcacccacgacatcgctgatgcactgaccgcctccggcgttgaagtgcagaagagcgaagttcgtctgccgaacggcaccatccgcaacgtaggcgaattcgacgtagccgtgcacctgcacgccgaagttgaagccaccgtacgcgttgtcgtggtagcagcttaagccgcacctaactgactggcacctcgcgtgccaggcggttaacatcgggcacgatcctgtttacaggtcgtgccttttgtttttctacacacccccaaattccaagtggccatgaacgatatttcagctcctgagcaatacgatctgcaaaccgctgccctgaaagtgccgccgcattccatcgaggccgaacaggccgtgctcggtggtttgatgctggacaacaacgcctgggagcgcgtgctggatcaagtctcggacggtgatttctatcgccatgaccaccgcctgatcttccgtgccattgccaagctggccgaccagaactcgccgatcgacgtggtgaccctggccgagcaattggacaaggaaggccagacctcacaagtcggcggcctgggctacctgggcgaactggcaaaaaacacgccgtccgtcgccaacatcaaggcctatgcccagatcgttcgccagcgcgccacgttgcgccaactgatcggcatcagcaccgagatcgccgacagcgccttcaaccccgaagggcgcaccgccgaagagatcctcgacgaagccgagcgccagatcttccagatcgccgaggcccgcccgaaaaccggtggcccggtgggcgtcaacgagctgttgaccaaggccatcgaccgcatcgacaccctgttcaacaccgacgccgccatcactggtatttccaccggttatgccgacctcgacgagaagaccagcggcctgcagccgtccgacttgatcatcgtcgccggtcgtccgtcgatgggtaagaccaccttcgcgatgaacctggtggaaaacgccgtgttgcgcagcgacaagaccgtgctggtgtactccctggagatgcccggcgaatcgctgatcatgcggatgctctcgtcgctcgggcgtatcgaccagaccaaggtgcgttccggccaactggaagacgacgattggccgcgcctgacctcggcggtcaacctgctcaacgaccgcaagctgttcatcgatgacactgcgggcatcagcccatccgagatgcgcgcccgtacccgccgcctggtgcgtgaacacggcgacatcgccctgatcatgatcgactacctgcagttgatgcagatccccggttccagcggcgacagccggaccaacgagatttccgaaatctcccggtccttgaaagctctggccaaggaattcaactgcccggtggtggcgctgtcccagctcaaccgttccctggaacaacgccccaacaagcgcccggtgaactccgacttgcgcgaatccggcgcgatcgagcaggacgccgacgtgatcatgttcgtgtatcgcgacgaggtgtaccaccccgagaccgagcacaagggcattgccgagatcatcatcggcaagcagcggaacggcccgatcggctttatccgcctggcgttcatcggtaagtacacacgcttcgagaacctcgcgccgggcagttataacttcgacgacgacgagtaaaacccaggctcaagggcgcgtctcggggagcgggccgaacaacgcgcggatggtcggttcgttgtactggtagttccagcgcagctcggtgccggcgcaaatatcctcacgggtaaagaatgctgttagcctcagtgattcccgaggttgctcgcctttctgggtctccacattgaaatacactgcttcgacgttgtagccaccgcttgcctggcgcaccgggtaaccggcttcgtagtcaaagatagtgttcatgcgcgacagcacgttatcgcctgagagcacgacttcgcggttgatggggctcgcggtcgtctcgtgtggaatctgataggggcgcacgtcgatcaggtacgggtcccggcgaaacccggcgatgtgatggggcagtaaaccgccgccgtatactcccagcacttctcccttcgtcaagtctttcgtgctcaccacgcacgactgtcctatcaataccgactcttcggcgaagcggcactgggcttgagtaaagggcaccacttcgattttttcgtcatacaactgcgcaaccttttcataaccttcccactggatgtacggcagtaccggctgcttgtcgaacagcgcaccgctcgttggggatttgccctggctttgcatggctttgatgcgcatcggttggccgtccacatcgcgtaggggatagcggccattgttggcgcggtcgtagaggcctcggtaattctgactgaactggtacgaggcgtgggagcgcatactgcgcagctcgctgggcccgtatggatgaggtgggttggggaggggcgacggtagactttccagcgctgactcatagtcgacgttcgagtcggccgattcgaacagctcgctggacgtggagccggagcgcctcctggggggtgtcggcatcccgcccagtagtgcatccttctgcggatcaatctgccagccgccctctgcgttcttgccgatatacggttggtaggccctgaagcggctgcgggcgtcaagcaaacgccaccccagcgcgtcggctttgaccagatagtagttgccggactccagcacgtaatagcggtagctgccatccggcaggggcggggcttggtagacgccgtctgcgcgcaaggtcagcccttcggggggcgtcgggctggcgaaaagcgggtcgaaaggcagccccggtacagcaggggagtctgcccacggtgttggcgcacgtttgggcggcgcgggtttggccagcagttcgaggctggccttgcgcaaggcgctgggcaggtccgcaactcccgactggcgcagcacgtgactgcgctcgcggtctgaaaggctttgatcgatagccgtgagcaggtcggctggtgcgcccagcgcttggccttgagcggtatggcaagtgaactgctctcgttcatgcaccagcaagtgcccggtgtcgttttcgccggctccgttgctatagagcaaggggccggtgagcgtttgctcgcggatctccagtcgactggatgttggccagccgggcaaagactccagtgctgtcagcaccagcacagggtagtcggggctgcgggttgtcttcaggtagaggctttcgtaggcacgatggacgctggattggttcaggtattggccgaattcccaatgctgttgcgcggtgagggagcgttccagctgtaatcgctgctgatctgcgaagctcagcccgcaggtcgcctcttccagatgatatttcgataggccgggcaggatgtcacggatcgtctgctccagcgcagacgcgggttgttcggcgcggtcgttgagccaggtaaacacgcggtctgcgtgctcatgggcctcggccgccagggtgaatgcgaggttttcgacgttgctggagcgtccgacccgtctggcgggcagttcattgaactgcgcttgggtcagttgttcttccaggcagtccagcaactcgcctttgcgaaagcgtgcttcagggactgtgatttccagcccctggttgccgtggctgaacaggacccgttgctgttcatcgaccaccttcagcacgcggttcgtcggccattttggcaaggataccagcaggtgaaactggataagtggagagtgtcgactcacttcgctgccttcggcacgggcgaagttgaagtcttcgatttcctgcgccaggttgaagcgcctgactgtgtcgcgcaggcccggcggcgggcgtacgacttcctgatgcgcctggcgcagcaggctggcgtcggcaccactgacccgcaggatcggctccaccgctgatgccttgatgtttgacgcatcagggcccagccgcttgatcagtttgaagtcgtcccaatcgcgggcggtttcgtgttcctggcgccacccgccgacgtcattgctgagcatctgcggctgataggcgcgcgggtcgctggggtgttgcaggcgccattgcgaggtgcgcgggtcgcgggccagggcgtgcaggtggtcatcgagagacacgtaatgctgcccctcgtagtgctgcagcccctgggcgtcgaccggcacctgcgctggcagtgtcttgagttggcggtacggcaccatgtccgggttccacaggcgcatgccctgttcctgcaccttgaccgcgatcaaccgcgcgccgaaccctccggctttcaccgcgcctgcggtagcgacgccctgggcgacggtgtccaccacgtccatcatgtcattcagggcctggtcgctgtcccctcggctccaggcggcaaacccgttgtaaaggctgtcgaccagctgtgcggctgttaccaccagcagcacttcgcccacgatgggaatgaatgacgccgcgaagaacagtagcgacttaccggtctcggcaaagtaatgcaggcgtttctgccggctcagggcgtcggcatctgccgttggcaccgccagggtgcgggcgtcgtcgcggatctgttggatacgttgtatggcgaccgcctggaacgcgtcgccctggatcagggtacggctgactttggcttcaaggcgggccgcaatcaccctggcgggagagtcgatgcgtggcgcgacggtcctggcgggcagcaccgtgagcagcgtgccctggtgtcgaagcggtaccagtcgctggaaaaaaccgaagtaggcgggctgggccaggcgttgtaccagcgagtgttccagggactccattgactcatgcttgcggaacgagccgacgggatcgtcgggtatatagagcagttgctgtcgatccacttgcgtatcgtggatgaccagcacgctcggcagcaccacgccgcccagggtcaggtggttgcattgcaggtcgggatggccgccattgcgggccagggccagtagagtgctgtacagtctttgatcaatccagcccctcaaatgagcgatatgcgaggcggtttcaaaccgagtctgttcacttcgggaaaaaagctggcgtacctgcacggctgcctggggtgtgtccttgggcgcaagcagcgtctcaaggtgttggaggtaatgcttgcccaggtcgaggctgcgacagaaaccggcgaacatgatcggtgagatgggctgccgggttatcgcggcgccatacacgttgtaaatggccgatccggcttccatcccgccatcctcggcttcgcccgcttcaaagttctgcagtgcggcttccaacaggggttgttgggtggtcctggcgtgggtcttgatcaggcccagcaggtgatggtttttccattcgcgcaacacaaccccacgctcactgtcgagcaggccgaagaaggtgctctggagcgcgctttcgaaatacggccgggcgtactccgaagggcttttgagctggctgagcagcgccttgaggttgtgccgggcctggttgttgtcgaccaggctgcggcgcaagtcatcccgcagcgtcttgtttgcccgggtgagccagggaggcaggtttttctgaatgaactcagcgtgggcctgcagcacggggggcttggccgtttttggcgtcagggcgctcatggcgggtcctagggtgggttggtttgccacaggttacccacgaagatttcccggaatggctagccgggtagtgcgcggcaatgggcgaaaccctatagcgactcggcctggaatgacggtgtggcaaaagccgaccattgccgtcggaattggtcaaaatttgtgctatattccgcgcccgcgattttccatctcaacaccggtcaccgtcatgcaaacagccaagccgttatttgactatcccaagtactgggccgaatgtttcggtccagcgccattcctgccgatgagcagggaggagatggatcagcttggctgggattcctgcgacatcatcatcgtcaccggtgatgcctacgttgaccatccgtcgttcggcatggcgatcatcggccggctgctggagtcccagggcttccgcgtcgggatcattgcgcagccgaactggcaatccaaagacgacttcatgaagctcggcgagccgaacctgttcttcggcgtcgcggccggcaacatggactcgatgatcaaccgctacaccgccgacaagaaaatccgctccgacgacgcctacaccccaggcggcatggccggcaaacgcccggaccgcgccagcctggtgtacagccagcgctgcaaggaagcctacaagaacgtgccgatcgtactcggcggcatcgaagcctccctgcgtcgcatcgcccactacgactactggcaggaccgggtgcgcaactcgatcctgatcgacgccaccgccgatatcctgctgtatggcaacgccgagcgcgccatcgtcgaagtcgcccagcgcctgtcgtggggccacaagatcgaagacatcaccgatgtgcgcggcaccgcgttcatccgtcgtgacacgccggccggctggtacgaagtggactccacgcgtatcgaccgtccgggcaagatcgacaagatcatcaacccgtacgtgaacacccaggacacccaggcctgcgccatcgagcaggaaaaaggcccggttgaagacccggaagaagccaaggtcgtgcagatcctggccagcccgaaaatgacccgcgacaagaccgtgatccgcctgccatcggtggagaaagtccgtggcgacgcagtgctctatgcccatgccaaccgcgtgttgcacctggaaaccaacccaggcaacgcccgcgccctggtgcagaagcatggtgaagtggacgtgtggttcaacccgccacccattccgatgaccaccgaagaaatggactacgtgttcggcatgccgtacgcccgcgtcccgcacccggcttacggcaaggaaaaaatcccggcctacgacatgatccgcttctcggtgaacatcatgcgtggctgcttcggcggctgcaccttctgctcgatcaccgagcacgaaggccgcatcatccagaaccgttccgaagagtcgatcatccgcgagatcgaagagatccgcgacaaggtgccgggctttaccggcgtgatctccgacctcggcggcccgaccgcgaacatgtaccgcatcgcctgcaagagcccggagatcgaatccgcgtgccgcaagccatcgtgcgtgttccccggtatctgcccgaacctcaacaccgaccactcgtcgttgatccagctgtaccgcagcgcccgtgcgttgccgggtgtgaagaagatcctgatcgcctccggcctgcgctacgacctggccgtcgagtcgccggaatacgtgaaagagctggtcacccaccacgtcggtggctacctcaagatcgccccggaacacaccgaggaaggtccgctcaaccagatgatgaagccgggcattggcagctatgacaagttcaagcgcatgttcgagaagtacaccaaggaagcgggcaaggagcagtacctgattccgtacttcattgccgcccaccccggcaccaccgatgaagacatgatgaacctggccctgtggctcaagggcaatggcttccgcgccgaccaggtgcaggcgttctacccgtcgccgatggccaccgccacggccatgtatcactcgggcaagaacccgctgcgcaaggtcacctacaagagcgacgcggtgaccatcgtcaagagcgaagagcagcgccgtctgcacaaggcgttcctgcgctaccacgacccgaagggctggccgatgctgcgtgaggcactgacccgcatgggccgcgccgacctgatcgggccgggcaaggaccaactgatcccgctgcaccagccgagcaccgacagctaccagagcgcccgtcgcaagaactcgacgccggccggcagccacaaggtcgccaaggaaaccaccaccaggatcctcacccagcacaccggcctgccgccgcgtggcagtgacggcagcaacccgtgggacaagcgcgaacaagccaaggccgcggcccaggcgcgcaacaagcaggccgccaaggaacgcgccgatgcggccaagggcaagggcggcaagcctgcgcgcaagccggtcgtgccacgttgatcacagcctgaacatgccagacgccagcctcgtgctggcgttttgctttctagctgttgggtaacctgtttgctaaggtggcgcccattaaatcgctatcgcgggcaagccccctcccacattcgaccgcattccaaatgtgggagggggcttgcccgcgatggggcccgcctggtcaccatcattctcaaggaagaacactcatggctaaccccctggcctccatcggcatggactccaaccgctcgcagttcatggcgcgccaacgcatcgaaagccagatcaacctgccacgcctgttcgcggccattgactccgatccaggtatcgttggcgcaggcgtcgtatacatcgacgccgatttcaacgtcatcaccctgcgcgaattcaagcccatctgcagcatcaagcctaagcgcatcattttgcgtgaagcacagaagtacattgcgccgacgcagtttgctcaacatgtcgtgagcaatcctcgagagtcccgactgattggcgaagccgtcaataccggaatctcctgcctgggggctgtcatcagctgggctgcgatcgccagtggaaccattctggtgcctttcagtgccggcgccagttccgtcatcgttgtggtgggatatgcggctgccggtgcaagttcgctccagtgtttcaacggcattgctcgaacagcgctggaggtcgccaaaccggaggtaaacgattggctcgacagtgagggctggtaccagaatgcatccgttgtgttggacgccgtatcactggccggcgtaggcggttcggccctgacgacggtcaagctggtcagggctgccaaagcatcgacgggcaagagcctgcgtgacgtgcttcgcggtttgaatcgccaggaaagagccaagctgacgaaagagctgctcagcatcaaccatcccagcttgaccgcgaagatgctcaagttgaggcaggcgtcgggcgaactcaccaagcgtttcacccctacgcagctcaagcacagcaccactacccagatcaaagacgtcctcggcgcaaccataggatttggcgggagtgcgtactccggaaacgtcaataccatcgcgatagggttgtacgaggaaataaacgaatgaacgagttaatgacgctacgcgactttttcaggcattactttctgacgtttcttggcggtgtattcgctgcttacttttcgttggcgttggctgtggcgctggcctttgtcacctattttcgtgatgtgccccttgctcaagtggggctcaagatcatgtctgccggggcgctgctcattctgttgacggtccatagcaactttatgattttgcggggccgcccctcctgggtgtgggtgatggtcggcatctacgtcgcctgtctactgtttgtagttccgatgattcaattccagcctcacaaaattctttatgggttggcgctgttattcccattgctcggattattgacacttaacagcaaggttcaacgagagatgcgtcagaagctgcttgagatccgccacctgcgccaagccgtgatcgccaagcgcaaaaccggctgattgggtagattccccacccaccttcacacccgcgccacaaatatgtgcgtcacttgcaccagagcatcgccgttggcgccgttttggtgctgtactgcaccgggtcccacgataaagcgcaatgaccgccgctctggcataagtcttgcgcgctttgtgtccatgccctggctcgcaggaggccgccgtgtcgattcatgtcgcgttgcaccacgttacgcattaccgctacgaccgcgctgtcgaactcggcccgcagatcgtacggttgcgtccggccgcccatagccgcacgcggattctgtcctacgcactgaaagtgctgcccgagcagcacttcatcaattggcagcaagacccccagggcaattacctggcgcggttggtgttcccggagaagaccgatgagctgcgcatcgaggtcgacctggtcgccgagatggcggtgttcaacccgttcgactttttccttgagccctacgccgaaaaaatccccttcagctatgccgccgatgaacagcgcgagctggcgccgtacctggaaaccctgccgctgacgccgaagtttgcggcctaccttgcgggcatcgaccgtactccattgccggccgtggatttcctggtcggcctcaaccagcgcctggcggccgatatcggctacctgatccgtatggaaccgggcgtgcagacgccggaattcaccctggaaaacgcctccggctcctgccgtgattcggcctggctgctggtgcaattactgcgcaacctgggcttggcggcgcggtttgtgtctggctatctgatccagttgaccgccgacgtcaaagccctcgacggcccgtccggcaccgaagtggacttcaccgacctgcacgcctggtgcgaagtgtatttgcccggtgccggttggatcggcctggatgccacctctgggttgttcgccggtgaagggcatatcccgttggcctgtagtcccgatccctcgtctgccgcgccgatcagtgggctggtggaaccctgcgagtgtgaattcacccacgaaatgtctgtagagaggatttgggaggccccacgggtcaccaagccctacaccgaggaacagtggctggcgatccaggcactgggacggcagatcgatggcgacctgctcaaggacgatgtccgcctgaccatgggcggcgagccgacctttgtctccatcgacgatcccgacggcgccgaatggaacaccgccgccctcggcccggacaaacgccgcctgtccgccgagctgttccagcgcatgcgcaagcactacgcgcccaaagggctggtgcacttcggccagggcaagtggtaccccggcgagcaactgccgcgctggtcgctcaactgctactggcgccgtgacggcgtgccgatctggcacaacagcgcgttgatcgccgatgagcgagaggattacggtgcggacggcgtgatggccgggcgtttcctggccagcgtcgccgagcgccttaagctgccggcacgctttgtgttcccggccttcgaagacaatttctactacctgtggcgcgaaggtgcgctgccgcagaacgtcactgcccaggacccgcgcctgggcgatgagctggagcgcgaacgcctgcgcaaggtgtttgcccagggcctggataaaatcatcgggcaagtactgccgctggcgcgtacgcctgccaatgatcgttggcagagtggccgctggtacctgcgcgataaccactgccgtttggtgccgggggattctcccctgggctatcgcctgccgttggcctcgcagccgtgggtgacggcggcggagtatccgtttgtgcatccgactgaccctaaccaggatcagcccgagctgccgactaccgcccaactgcaaagccatggcgaacctgcgccgagtgatgagcgcgtgcccaaggtggacgagtctgccgactggctgacccgcaccgcgctgtgcgccgaagcgcgggaagggcggctctatctgttcatgccgccgctggagcgcgtcgaggactatctggagctggtggcggccatcgaagccaccgccgaagaactgcactgcccggtcttgctcgaaggctacgagccacctgccgacacgcgcctgagcaacttccgcgtcacgccggacccgggtgtgatcgaagtcaacgtgcagccgtccgcctcttgggacgagttggtggagcgcaccgagttcctctacgaagaggcgcggcaaacccgcctgactaccgagaaattcatgatcgacgggcgccacaccggcaccggtggcggtaaccatttcgtgctaggtggcgccacgcccaaggactcgccgttcctgcgtcgccccgatctactgcgcagcctgatcagctactggcacaaccacccgtcgttgtcctacttgttttccggcctgttcatcggcccgacctcccaggcgccacgggtcgacgaggcgcgcaacgatgcactgtacgagctggaaatcgccttcgcacaaatgcctgctcccggcgaagaatgcccgccctggatggtcgaccgcctgctgcgcaacctgctgatcgacgtgaccggcaacacccaccgcgccgaattctgcatcgacaaactctactcaccggacggcgctaccggccgcctgggcctgctggaactgcgtgcattcgagatgccgccccatgcacgcatgagcctgacccagcaactgctgttgcgcgccttggtcgcgcgcttttggcgcgagccctacgcaccgcctaagctggcgcgctggggtaccgagttgcacgaccgtttcctgctgccgcacttcatcgagcaggattttgccgatgtgatcgtcgagctcaacgcagctggctacccgctgcgcgccgagtggtttgccgcgcacctggaattccgttttcccaaggtcggcgactacgccgtcagcggtatcgagctggaactgcgccaggccctggagccctggcatgtgctgggcgaggagggcgcggtgggtggtacggtgcgctatgtggattcgtcgctggaacgcctgcaagtcaaactgaccgggctgccaccgcaacgctacctgctgacctgcaacggcatcccggtaccgctgcaggcgaccgggcgcgttggtgagttcgtcgccggcgtgcgttatcgcgcctggcaaccggccaactgcctgcaaccgaccatcccggtgcatgcgcccttggtgttcgatctgctggatacctggatgcagcgttcgctgggcggctgccagtaccatgtggcccatccgggcgggcgcaattacgacagcttgccggtgaatgccaatgaggcggagagccggcggatggcgcggtttttcaggcttgggcatagccccggcaagcttcccgtaccgacggtaaccgtcaacgatgaattaccgatgaccctggatatgcggcgccaccccaataaaaatgactgaacactgtttaaatgtgggagggggcttgcccccgattgcggtgtgtctgctgtccatctgttgcctgacagtccgccatcgggggcaagccccctcccacagtagattgcagtgaatttgagttaatctgagcccccttgcccctgccgagcgttccatgtccgacttgctcgaccgttacccgctgaccgcgggcacttatcacgaactgctggacgacagcggcgcagtgcgtgcccattggcagcgcctgctcgaccacctgcaacgcagcacgcccgcacaactggcccagcgccaggcgctgctgacccggcagatccaggaaaacggcgtgacctacaatgtctacgccgaccccaagggcgccgaccgcccctgggaattggacctgctgccccatgtgctggccgccgatgaatggcagcacctgtccgccggtatcgcccagcgtgcacgcttgctcaatgccgtgcttgccgacctgtacggtccgcaacgcctgatcaaggaaggcttgctgccggccgagttggtgttcgggcataacaatttcctgtggccgtgccagggtatccagccgccggacggtgcctttttgcacctgtacgccgtggaccttgcgcgcacgccggatggccgctggtgggtcaccgccgaccggacccaggcgccgtctggcgccggttacgcgttggaaaaccgcaccatcgtgtcccgtgcctttccggatctgtaccgcgacttgcaggtgcagcacctcaccggtttcttccgcactttgcaggaaaccctggcccgccaggcgccgggtgacgaccagccgccgctgatcgtgctgctcaccccgggccggttcaacgaaagctatttcgagcacctctacctcgcccgccaactcggctacccgctggtggaaggtggcgacctcaccgtgcgtgacagcacggtgttcctgaaaaccctcagtgggctgcgccgggtgcacgcgatcatgcgccgcctggatgatgacttctgcgacccgctggaactgcgcaccgactcggccctcggtgtgcccggcctgctcgatgcggtacggcaaggcaacgtgctggtggccaatgccctgggcagcggtgtgctggaatcccccggcttgctgggcttcctgccgaagatcaacgagttcctgtttggcgaagcactgatcctgccgtccatcgccacctggtggtgcggtgaagcgccggtactggccgaggcgctggagaaactgccggagctgctgatcaagcctgcgtttccgtcgcagagtttcaccccggtatttggccgcgacctggacgacgcacagcgccaggccctggccgagcgcatgcgtgcgcggccctacgcgtacgtcgcccaggagctggcgcagctgtcccaggcgccggtgtggcacaccgtcgatgaccacctgcaacaccgtgccatcggcatgcgggtgtacgccgtggccagcgatgagggctatcgcgtgttgcccggcggcctgacacgagtggccgccgaagccgatgccgaagtggtgtcgatgcaacgcggtggtgccagtaaagacacctgggtgctcggcgagcgcgcttccggtggtgaacattggcgtgcacagcgcgcaatcggcgcccatgacctggtgcgccgcgatccttacctgccgtcccgtgtggtggaaaacctgttctggttcggtcgttattgcgagcgctgtgatgacagtgcgcgctggctgcgcatcgtgctggcgcgttatgtggacggtgacgatccgctggccttgcaggctgccgtcgagctgggcgagaacctgcgtttgctgccggaagagggcgagttgccggaacgcctgctggcggcgttgctcggtgacgactggccctcaagcctgcgcgccaacctgcaacgcttgcagtgggcggcgtcccaggtgcgcggcaagctgtcccgggagaactggcaggccctggtggagctgcaacgtgaagccctggagctggaaagcgagtcaccggattttggcgagttgctggactttctcaaccgcctggtaatgtccctggcggcgctgtccgggttcgccctggacgacatgacccgcgacgaaggctggcgcttcctgatgatgggccggcgcatcgagcgcctgcaattcctcagcagcagcctggcggcattcctgcgcggtgtggccgtgttcgatcaggccgggttggagtggttgttggaattgggcaacagcagcatcacctatcgctcgcgctacctggcggtgccgcagttgatcccggtgcttgatttgttgctgctggatgaacagaacccccatgcggtgctgttccagctcaaactggtgagccgcaccctgcgccgtctcaacgatgactttggcgtgccgcgtgaaaccggccttggcccgttggtggagcgcctggcgcgcttcgacctgggctgcctggagaacccgctgttcggcgaatccagcgtgcgtgccgcgctggacggcctggccgacctgctgcaagcggtggccgatgagagtgggcaagtgtcggatcgcctggccttgcgccattttgcccatgtggatgatgtcagccagcaaacggtgtcggtgtgatgagtgcgcgctaccagattttccacgatacccattaccactacgacagcccggtgtcactggcccagcagctggcgcacctgtggccacggccgtgcgcctggcagcgctgcagctcgcagcaactggatatcagcccgcagccgtcgtcgcgccgcgatgagctggacgtgttcggcaacccgatcacccgcctggcattcgagcggccccatgacgaactgctggtcaatgccgggctgaccgtggaagtgctggcgcggccggtgctggatttccagcaatcgccggcctgggaccagacccgcgaccgcctgacttacagcagccagccgatgccaggcgagttgatcgaagcctgccgctatcgtttcgaatcgccctacgtgcacctgaagaaaaccttcgtccagttctccgaaagctgtttcccgcctggcgcgcctttgctgctgggcgtgcaggcgttgatggaaaaaatcttcagcgaattcaccttcgatgccgaagccacccaggtcgccacgccgctggtggaagtgctggagcgccgtcgcggcgtgtgccaggacttcgcccacctgatgctcgcctgcctgcgctcccgcggcctggcagcgcgctatatcagcggctatctgctgacccagccaccgcccggccagccacggctgatcggcgccgatgcgtcccatgcgtgggtctcggtgtattgcccggtttcaggctgggtggactttgatccgacgaacaatgtgcagccggcactggagcacatcaccctggcctggggccgggacttttccgatgtgtcgccgttgcggggggtgattctggggggagggagccatgacccggaggtgcgggtgacggtgatgccgctggaatgatggttgattgtgccgagccggagcagccggctcagcacaaaggaaattattcagccggatcttttggtgtttcgctctcgtcgctcgttacttcagcatctgcatccgggttcagtgcgccggcctcttcgtctgcagcggctttcttgcgttgcagtttttcctctttcttctgttccttggccaagtctctctgacgtttggcgaaggagtaattaggtttggccatgggcgatcctctagggtcgaaggtgagggtggcggcgcgcagctgccttgggctgccatggtagcagcttagcaccgcgcttggccttcacttaccgcaggcgtaggcggccagcaggccgttgaacagttgattgaggtgcatggctcgggctccagtgggtgatgggccgatcataatcagcgtgcggcactttggctggttgattgtgtcgataagtctgatagcctaaagttgtatacaatctgttgattcaggtcataagaatttctgcctgcttcaggcacccttgtcgcattacgcgttttttaaaccctgccttggagattcacatgtttgccaaactcgttgctgtttccctgctgactctggcgagcggccagttgcttgctgcagagtgcaaggtcactgtcgactccaccgaccaaatgtccttcaacaccaaagccatcgaaatcgacaagagctgcaagacattcaccgtcgagctgacgcactctggcaacctgccgaaaaacgtcatgggccataactgggtgctgaccagcgccgccgacatgcagccggttgccactgacggcatggccgccggtatcgacaagaactacctgaaagacggcgacacccgcatcatcgcccacaccaaaatcatcggtgccggcgagaaagactcggtgaccttcgacgtgtcgaagctggccgccgggactgactacgcgttcttctgctcgttcccaggccacatctcgatgatgaaaggcactgtgaccgtcaagtaacaccgcatcatcgttcatcgggggcaagccccctcccacattcaaccgcattctcatgttggaactcggtcaactgtgggagggggcttgcccccgatggcgtcttgacaatcaacacgaaactttcggcttcaccttatggcgcaaacggcatgacccgcttgtgctccgtcttgcgatacgtctcgcagataatcctgaacgcttcctcacgtaccggctcgccgtgcaggaacgcatcgatctccgcgtaggtcacgccatgtgacgcttcgtccggcttgcccggcgacaggtcttccaggtccgcagtaggcactttttccaccagcgactccggcgccccaaagtgccgcgcaatcgcacgcacctggttcttcaccagcccgctcaacggtgccaggtcgcacgcgccgtcaccgaacttggtgaaaaagcccatcaccgcttccgccgcatggtcggtgccgatcaccaggccaccggctgcgccggcgatggtgtactgcgccaccatgcgcatgcgcgccttggtattgcccagcacgaaatcgcgggacaccgccgccttgccttcaaatgccgcgacctcactggccagggctttgaccgccgggccaatgttcacggtgtggcgctcgtccggctcgataaagtccaccgaggccgtggcgtcgatttcgtcgaactgggtttcgtaaggcaggcgcacggcgataaagcggtaagcctcatcacccgtgctttcacgcagttccttcattgcacgttgggccaagaggccggcggtcagggagtcgacgccaccgctgatgcccagcaccagcgccttgagcccggacttgcgcaggcaatcctggataaacgccacgcggcgggcaacctcggcctcaagggcggcctggtcgttgaacggcgcttggaccttgagctgctgcgcaatctcacgctgtacggcttgcatgattcactccttgcttggtagggcaggtactttgaaaacgtgacgcaaataggcgacgaaattcgggtcggtgcagtgggtcttgcccgcttcatcggagatctttgcgacgggctggccattgcaggccgtcattttaagtacgatgctcatcggctcgacacccggaatgtcacaggtcaggttggtgccgatgccaaagctcacattgatccgaccacgcagcgcgcggaatatttccagggccttgggcagcgagaggctgtcggagaacaccagggttttgctcatcggttcgatgccgagcttgtggtagtgggcgatggctttttccgcccactgcaccgggtcaccggagtcatggcgcaggccgtcgaacagcttggcgaagtacaagtcgaagtcgccgaggaacgcgtcggtggtgatgcagtcggtcagcgcaatgcccagcaggccacggtattcgcggacccagcagtccagcgcggcgatctggctgtcgatcaggcgtgggccgagttgctggtgggccatgatccattcgtgggccatggtgcccagcggcttcatgtcgaactcgcgggccaggtgtacgttgctggtgccgacaaagcgcccggggaagtcatgcttgagcacgctgaccacttcttcctgcacgcggtacgagaagcgccggcgcgtgccgaagtcggccacttgcagctcggacagctcgtcgctgctggcgttggcggtcagccagtcgaacttgcggtacagctgttcgcgggcctgttcgaggatcaccgtctggtagcgatagcgattacgcacttcgctgacgatggccagcatcggcacttcaaacagaatcacatgcagccacggcccgcgcaggcggatgaacagctcgccgttctcgatgccagtctgcacgtagcgcagattgaagcggaacagcccaaggaaacgcaaaaagtccggcttcatgaagctgatacgctccaggaagcccagttgatcggggctcaggctcaattcggcgaggcgttcgatctggtagcggatctccgccaggtacgggcgcaggtcttcgctgttacggcaacggaactcccattcaacttccacattggggtagttgtgcagcaccgcctgcatcatggtcagcttgtagaagtcggtgtcgagcaagttctgcacgatgcgatcggcaaacacactctcgctcataacgggaatctccagacgggacggcgatgggcgccgacctttacgcacaattaagaaaggggactagtggcgcatagacgtgggtcggtttgccagtgttttttcagtcggcatctagctgctccatcatccacttcacaaaatcacgcacttttggcacctccgccgaatgctccgggtaggccaggtaataggcgtcctggctcggcatcgcatgttgccaggggatcaccagtttgccctcggccagttcctctgccaccaggaagcgcggcagcaaggctacgccgcagcccacctgcgccgcccgaatgcacatatagaaggtatcgaaacgtggcccgtggtagctgtgttcggtctggtaaccctggctggcgaaccagtcatgccagccctgggggcgcgaggcgttttgcagcagcaccaggtcgctgagttgcgtggggtcggtgaagggccgcgccggcaggctttccggtgcgcacaccggcaccagttcttcgctgaacagcttcaggctctcggtgccagggcgtgaaccctggccgaaatagaaggccatgtcggccttgccttgcagcagctcgtccggctcctgctcgttgcacaggtccaggtggatctgcgggtgacgcagccgccagcccttgaggcgcggcaccagccagcgcgcgccgaaggtgtagggcgtggacacgcgcagtacttcggtctcgccgccgtaggaacgcaggtagtgggtggacatctccacctgggtgaggatcttgcgcacttccaccaggtacaggtcgcctgccggagtcatctgcaaacggcggcgcacccggcgaaacagcaggtgttgcagcaattcttccaactgcgccacctgtttgctcacggcgctctgggtgagattcagctcctcggcggcgcgggtaaagctcaggtggcgggtggcggcttcgaagcactgtaaggcggtgatcgagggcaaatgtcttttgttcagcacggcgtgcctctttttatgctttgcatgaataaacggaatgatatctcgcctaatcgtcgtttgttggcaagtcttgggccagctacaaataaggcctggatcgccgtgtgtgtgacggtgcgaattttctgtttgaaattgaaggagtgacccatggttgccgcattgcttgatcgtctcggggtaaacccggcgttgtaccagtcgggtaaacaacctgtgcattcgccgatcgatggcagccgtatcggcagtgtgcactgggaaggcgccgccgaggtggagcaacaggtcagtcgcgccgagcatgcattcgaagcctggcgcaaagtgcccgcgccgcgccgtggcgaactggtgcgccaatttggcgatgtgttgcgtgaatacaaggccgacctgggcgagctggtgtcctgggaagccggcaagatcacccaggaaggcctgggcgaagtgcaggaaatgatcgacatctgcgacttcgccgtcggcctgtcgcgccaattgtacggcttgaccatcgcctccgagcgcccgggccaccatatgcgtgaaacctggcacccgctgggcgtggtcggcgtgatcagtgccttcaacttcccggtggcggtgtgggcgtggaacaccgccctggcgctggtatgcggcaacgcggtgatctggaaaccgtcggaaaagaccccgctcaccgccctggcctgccaagcgttgttcgagcgtgtactgaaaaaattcgacggtgccccggagtacctgagccaggtgatcatcggcggccgcgacgccggtgccgcgctggtggacgacccgcgcgtcgccctgatcagcgccaccggcagcacccgcatgggccgcgaagtggcgccgaaagtcgccgcacggttcgcccgcagcatcctggagctgggcggcaacaacgcgatgatcctcggcccaagcgccgacctggacatggccgtgcgcgccatcctgttcagcgccgttggcactgccggtcagcgctgcaccaccttgcgtcggctgatcgcccatgaatcggtcaaggaagaaatcgtcacccgcctcaaggcggcctattccaaggtgcgcatcggccacccgctggaaggcaacctgatcggcccgctgatcgacaagcacggcttcgacaacatgcaggacgcgctggaacaggccctgagcgaaggcggcaaggtgttcggcggcaagcgccaactggaagacacattcccgaatgcctactacgtgtcgccggcgattgtggaaatgcccgagcaaagcgatgtggtgtgcaccgagaccttcgcgccgattctctacgtggtcggctacaccgacttcgccgaggccctgcgcctgaacaacgccgtgccccaaggtttgtcgtcgtgcatcttcaccaccgacgtgcgtgaagccgagcagttcatgtcggcggtgggcagcgactgcggtatcgccaacgtcaacatcggcccgagcggcgcggaaatcggcggcgcgttcggtggggagaaagagaccggtggcgggcgtgagtcgggttcggatgcgtggcgcgggtacatgcgtcggcagaccaatactgtcaattactcgcttgagctgccattggcacaaggcattacattcgactgattctgctggctggaatgagatcaaaatgtgggagggggcttgcccccgatagcggtggatcagctgtacatctgtgggctgacacatcgcgatcgggggcaagcccccgcccacatttgaccgagctgtttgttaggtttcatcacggagtctggcaatgccattacgcgaaacatgtttatgggaacacctcacccccagccgtccggatcgcgctgcgctcaacggcgaggtcaaggtggacgtgtgtgtgatcggcgccgggatcaccggtctgtcggcggccattcatttgctggaacagggtaaaagcgtggccgtgctggaggcgcatcgcactggccatggcggttcggggcgcaacgtggggctggtcaacgccgggatgtggattccgccggacgagatcgaagccggtttcggcgaggcggtgggcagccagctcaaccgcatgctgggcgcggcaccgtcgctggtgttcagcctgatcgacaaatacaacatcgattgccagttgcgccgtgagggcaccttgcacatggcgcacaacgcccgtggcgaggcggacctgcgcagtcgtgaagaacagtggaagcgccgtggcgcaccggtggaactgctcaccggccaggcctgcgagcaggccacgggtactaaaaaaatcgccgccgccttgctggaccggcgtgccggcactctgaacccgatggcctacaccagtggcctggccagtgctgccgccgggctgggcgggcagttgttcgatcattcgccggtcactcaacttgagcgccaaggtgcgcagtggtcggtgcagaccgcccagggctcagtgcaggctgcacaggtggtcatcgcctccaacgcctacacagaaggtgagtggactgaactgcggcgcaattttttccccggttattactaccaggtcgcatctgccccgctgacggacgccgccgccgaacagattttgcccggcggccagggctcctgggatacacgccaggtcttgagcagcatccgccgcgacgccgacggccgcctgttgctcggcagcctgggcaacggcaaccagaaacccacctggttcctcaaggcgtgggccgatcgggtgcagcagcattacttcccgcacctcaaatcggtgcagtgggaatacacctggaccggctgcatcgcctttaccccggaccatttgatgcgcctgttcgagcccgccccgggcattgtggccgtaacgggctataacggccgtggcgtgaccactggcagtgtggtcggcaaggcgtttgccgactatttgtgtcaccagaatccccaggccttgccgattccctttgcgccgatgcaaccgttgtcggcagtcgggttacgcagctgtctttatgaggcgggtttctcgctgtatcacgccggccaatgcctgaggatcgtgatctgatcagcgaaataccgctcaaaagcctgcattttcttagcaggctactaatctgtattggtgcaagtcgtagcagtcgcgcactgtaaatgtgcagttccgttacgccggctgttacagctgtaggaactgtcgtttataggtttggttgcaggtgcgacctgccgaggttgtactttttcgatccattggttgcacctctggacgctagagggttgcacgtactggcgaacggagccgaaacgcctgcaataacaatgacaccgtgtctttttgaagaataaaaacctaatggcacgcgctttgctctgggctttcagtgaaaagtttgaacgcaagttgtcgtgccaaaaatcaaaaatatcggagcaccactcatgtcccagacgttttacaagaaaggttttctggccctcgccgttgcagcggcgctgggtgtttctacgtttgttcaagctgatgtgaagattggcgtggcgggcccgatgacgggtgccaacgctgctttcggtgagcagtacatgaaaggtgcccaggcggcagccgatgtgatcaacaaggccggtggcatcaacggcgagaaaatcgtgctggtggccggcgacgacgcctgcgaacccaagcaggctgtagccgtggccaaccgcctggcggaccaggacaaagtgatcggcgtggtcgggcacttctgctcctccaacaccatcccggcgtccgaggtgtatgacgaagccggcatcatcgcaatcaccccaggctccaccaacccacaggtgaccgaacgcggcctgggcgccatgttccggatgtgcgggcgtgacgaccagcaaggcatcgtggccggcgactacatcgtcgatgtgctcaagggcaagaaagtcgcggtcatcaacgacaaggacacctacggcaaaggcttggccgacgccaccgctgcccagttgaccaagcgcggcgtcaagccggtgctggaagaaggcctgacccgtggcgagaaagacttcagcgccctggtcaccaagatccgctccaccggtgccgacgtcgtgtacttcggcggcctgcacccggaagccggcccactggttcgccagatccgtgaagcgggtctgaaagacgtgaagttcatgtccgatgacggcgtggtcaccgacgaactggttgccaccgctggcggtaagcaatatgtcgacggcgtgtacatgaccttcggcgccgacccgcgcctgctgccggacagcaaggcggtggtggaagagttccgcaagaacggcaccgagcctgaaggctataccctgtacgcctacgcgtcgctccaggccctggccgccggcttcaacggcgccaagtccaacaagggcgaagacgctgccaagtggctcaaggctcacccggtgaaaaccgtcatgggcgagaaagcctgggattccaagggcgacctgaaaatctccgactacgtggtttaccagtgggataaagacggcaaataccatcagttggaaaagcagaagtaagactgagcgccgccgttccaatgtgggagggggcttgccctcgatagcgcagtgtcagccaacgcatgcatgactgacgcaccgcaatcgggggcaagccccctcccacagggggagtggtgttgttattgaaatctgttttttcctccagaagcgccgcacacctcccggtgtgcaggtgctcaccgcgtgagattgcgttatggatggtattttcctgcagcaactggtcaacggcctgaccctcgggtcggtctatggcctgatcgccatcggctacacaatggtctatggcatcattggcatgatcaacttcgcccacggcgaggtttatatgatttccgcttacctcgcggcgatcagtctggcactgctggcttacttcggcatcgaatccttcccgctgctcattctcggcaccttgatcttcaccgtggtcgtcaccggcgtgtacggttgggtcatcgagcgtgtcgcctacaaaccgttgcgcaactccacccgactggcaccgctgatcagcgccatcggtatctccctgatcctgcagaactacgcgcagatcgcccagggcgcgaagcaacaaggcattcccaccctgctggcaggcgcctggcgcgtcgatttcggcacagggttcgtccagctcacctacaccaaggtcttcatcctcgtggcggcgttcgccggcatggggttgctcacctacgtgatcaagtacaccaagctcggccgcatgtgccgcgccacccagcaagaccgcaagatggcctcgatcctcggcatcaacaccgaccgggtgatctcctatgtgttcgtcatcggcgccgccatggcggcattggccggcgtgctcatcaccctcaactacggcaccttcgacttctatgccggcttcatcatcggcatcaaggcgttcaccgcggcggtactcggcggcatcggctccctgcctggggcgatgttgggcgggatcatcctcggtatctccgagtcgctgttctcggggttgatcaactctgactacaaagacgtgttcagtttctccctgctggtggtgattctgattttccgtccccagggcctgcttggtcgcccactcgtggcgaaggtgtaaacatgtctgctgccaaatcaatcgatatcaagaaaagtgtggtcgatacgatccttgccgggctgatttcgctgatcgtgttcggtccgatcgtcggcgtggtactcgacggctacagcttcaacctggaaccggcccgcgtcggcctgctggtggccatcgtgatggtcggccgctttgccatgagcctgttcctgcaaacccccaagggcctgaagattttgcagggcttcgagagcagcggctccggcgtgcatgtgctggcgccggactacaagtcgcggctgcgctggatcatcccggcactgatcgtgatcgccatcgtgttcccgatcttcgccaacaagtacctgctcaccgtagtgatcctcggcctgatctacgtgttgctcggcctgggcctcaacatcgtggtaggtctggccggcttgctcgacctgggttacgtggcgttctacgccatcggcgcctacggcctggcactgggttatcaatacctgggcctgggcttctggaccgtgctgccattggcggccatcgcggcggcgctggcggggtgcatactcgggttcccggtgttgcgaatgcacggtgactaccttgccatcgtgaccctgggctttggtgagatcatccggttggtgctcaataactggctgtcgtttaccggtgggccgaatggcatgccggtgccttcaccgaccttcctcggcctggagttcggcaaacgggcgaaggatggcggggttccgttccatgagttcttcggcatcgactacaaccccaacatcaaattcctgttcatctacatcgtgctgttcctggtggtgctggccgtgctgtatatcaagcatcgcctgacccgcatgccggtcggccgcgcctgggaagccctgcgcgaagatgaaattgcctgccgttccatgggcctgaaccatgtgctggtcaagctctcggcgttcactatcggtgcatcgacggccggtctggccggggtgttctttgccagttaccagggcttcgtcaacccctcgtcgttcaccttcttcgagtcggcgctgatcctggccatcgtggtgttgggcggcatgggctcgacggtgggcgtggtgattgcggcgtttgtgctgaccgtcgcacctgagttgctgcgcagcttctccgaataccgcgtgctgctgtttggcgtgttgatggtggtgatgatgatctggcgaccgcgaggtctgatccgcatcagccgtaccggtgtgacaccacgcaagggggtagcgccatgagcaaggaagtcgtcctctccgtggaacacctgatgatgcacttcggtggcatcaaggccttgagcgatgtgagcctcaaggtcgaacgcaactcgatcttcgccctgatcggccccaacggcgccggcaagaccacggtgttcaactgcctcaccggcttctacaaagccagcggcggcaagatcgaactgaacatccgcggcaagcagaccaacgtgatccagttgctcggcgagcgcttccagccgaccgacttcgtgtcaccgaaaagcttcttcagccgtatgtactacaagatgttcggcggcacccatctggtcaaccgtgccggtctggcccggacgttccagaacatccgcctgttcaaggaaatgtcggtactggaaaacctgctggtggcccagcacatgtgggtcaaccgcaacatgctggcgggcatcctcaacactaagggctaccgcaaggccgaaagcgacgccctcgaccacgccttctactggctggaagtggtggacctggtggactgcgccaaccgcctggccggtgaactctcctacggccagcagcgccgcctggaaatcgcccgcgccatgtgcacccggccgcagatcatctgcctggatgaacccgctgcgggcctcaacccccaggaaaccgaagccctcagcgcgatgattcgcctgttgcgcgacgaacacgacctcacggtggtgctgatcgaacacgacatggggatggtgatgagtatttccgaccacatcgtggtgctcgaccacggcaacgtgatcgccgagggcgggccggacgcgattcgcaacgacccgaaagtgattgccgcctacctgggcgctgacgaagaggagctggtatgagcgcacctatcctcgaaatgaaggacctggatgtgtattacggcccgatccaggccctgaagaaagtctcgctgcacatcaacgaaggtgaaaccgtcagcctgatcggctccaacggcgcgggcaagtccacgctgctgatgtcgatcttcggccagccacgggccgagtcgggggagatcctctacaacggcgtcgacattacccacaagtcgtcccactacatcgcctccaacggcattgcgcagtcgccggaagggcggcgggtgttccctgacatgaccgtcgaggaaaacctgctgatgggcaccatcccgattggcgacaagtacgctcaggaggacatgcagcgcatgttcgagctgttcccacggctcaaggaacggcgtacccagcgtgccatgaccatgtccggtggcgaacagcagatgctcgccattgcgcgggcactgatgagtcgtccgaagttgttgctgctggacgagccgagcctgggcctggcgccgattgtggtgaagcagatcttctcgaccctgcgcgagctggcggccaccgggatgactattttcctggtggagcagaacgccaaccatgcgctgcgcttgtcggaccgcgcatacgtgatggtcaacggcgagatccgcctgaccggcactggcaaggagctgctggtcaacgaggaagtgcgcaacgcctacctcggcgggcactgatctaaataacgacgcggtccccctgtgggagggggcttgccccctcccacattaagccgatccacatgtatttttgtggtgtgaatagggttgccgccaaattgtggaaaacaaatccagccctcctccaaagcgcgacatatagccgccgcaaatccctgttttgtcacagttttgacttgtccccatccgctgtggaaccggctgtgggtaacgtgggagtagctggctgaaagccaacaaacacgcggcctgtagcgcggtgattgttttttgatcagcgggtttttgggtaccgcccgagcccgttgtcaacctgtttaaagacacaggtatatgactggaatatgtcccggcagcctgtggataagtctgtgactaaactctggaaagaccgccgcagaggccggaatgactggcctggagccatcgttctggtttgccgttcgtagaagggcctacatacgcaccggccaaggtcaagcaaaaaactttctaaaaccgcctgcaacccttgtgtatagaggcctgaggcattttgcacttgcccccaaagactgtgggcgcagttgtggataacctgcgcgcatatggctgtaagccacggtctataaggctttgctttaagtggttaaaaagtgatcaggcatgtgttaacttgcgtgcccagtagttgccgacatcgcggcgtacgggcattctgctggctgtttttttcccgatgcccgcaaggagaacaccatgtccgacacgctgtttattagtggcgcaacctcaggtttcggcgaagcctgcgcccgtcgttttgccgaagccggctggaaactggtgctcaccggtcgtcgcgccgaccgcctgaatgcattggtcgaagagctttccaagcagaccgaagtgcatggcctggtcgtagacgtgcgtgaccgcaagggcatggaagacgccatcgccaacctgccgccctcgttcgccacattgcgcgggctgatcaacaacgccggcctggcggtgggtaccgaccctgcacccaagtgcaatctcgacgattgggaaaccatggtcgacaccaacatcaagggcctgctcaccaccaccagcctgctgctgccgcgcctgatcgcccatggccgtggcgccggcatcatcaacctcggctccatcgccggcagctacccgtacccgggcagccatgtgtacggcggctccaaggcgttcgtgaagcaattctcgctgaacctgcgttgcgacctgcagggcaccggcgtgcgcgtcaccaacatcgagccgggcctgtgcgagagcgagttctcgctggtgcgttttggcggtgaccaggcgcggtatgacgcgacttatgcgggggccgagccgatccagccgcaggacattgcagataccatcttctgggtgatgaacacaccggcacatgtgaacatcaaccgcttggagctgatgcccgtgagccagacctgggctgggtttgcgattgagcgtggggccaagtaaggctttaaaccgcttcgctgccatcgggggcaagccccctcccacacttgaccgagttcagcatgtgaatgcggtcgaaggtgggagggggcttgcccccgatggcgtcagatcggccaaaacaggccataaggtacactcacctcctgaaaacccctccgcactctgcggattcaaggtttttgacgggaggaaatgtgagtaaccgaggtgagcaggcactgctcaaacaatcgaccatcctgatgttcgccgtggcgatcgccgggattgtcacgggtgtggtatccggcgcccagtccattctgttcgacggctttttctcgctgatcgccaccgccatcaaggtgctgatgctgatcacggccaagctgatcgccaagaaaagcaacgagcgcttccagtttggctactggcacctggagcccatggtgctgctgatcgaaggcagcttcctgttgttgatcgccatctacgcgttcctcaacggcgtgttcggcattatcaatggcgggcgcgagatcgagttggggctggtgatcatctatgcggcggtgtttaccgtcgtcgagttcggctatttcttctacgtgcgctaccgcaatcgcacgctgagatcatcgctgatccagttcgacaacatcagttggctggtggacgcgatgctctcggtgggcctgctgatcagctttctggcggccctgctgctcaagtcccagggctatggcgaatgggcggtgtatgtcgacccgttgatcctgatcctgctggccctgagcatgctggcgccggcgttcaagattttgcgcccggcgttgcgtgaggtgctggggattgcgccggaccacctggacgacaaggtgcgcgaggtcatggacgcggcacaggccaaacatggtttcgacgactacgtgtcctacgtgcaaaagcacgggcgcgcacggtttatcgagattcatgtggtgttgccggcggattacccggtggacaacgtcgcgaccctggatgggttgcgcgaagagatatccacagggctcggcacgccggatgcggcgcgctggttgacgatcagctttaccggagatcgcaagtggattgcataaggccctggtaacaggtcgccaagtgatacggcgtggtcgacggcatatcccgtcggctcaccgcgcccttggcatccaggcattcatgccagcctttggcatgcaaaaagtgctgttgcagcgccagcaactggcgctgtaaccgcgcttcgctgtcgggccgcaaggtcagtgcccgcaggtactcggcctgggcccagatgcgctgggtgctgtcacgcactgtgccatccagcgccaacatgccgctgacggcgccactctcgttatccacacccttgagttcggcgtaggcgaaggcccgtgtcagggaggcatgcaacggcgtaccgcgcagtacttcggacgactccagcaagaagaaccactcgaactggtgccctggctcgaaccagttatccacagcacccagcggtttttccatcatcacgccgtgctggcggtcgatgaagcgctgctgcatggcgttggccaggtccagcagggcgtcctgcgtgatggcgtcgtcgcgcacggccagggtggcgaggaagccttcggcgaggtgcatcagcgggttttgcagggggccggacttgacggatgaccagttgcgttccagcaccgcttcgtacaggccgtcgcctgtggaaaaccgttcggcgaccactgccagggcggcattgagcacagattccaccagcggctcacgcaccttggcccagtaatgggcgcaggcgaagatgatgaacgcgtgggtgtacaggtctttgcgcttgtccagcggtcggccggcggggtcgatgctgtagaaccagccgccatgttcggcgtcgtggaagtgccgttgcagcgagcggaacaacgccgccgcacgttcttcggcaaaggccgcatcgggtccgccgatcaggctggcgaacaggtacaactgccgggcgcaggccatggcgcggtagcgttgcgggggtaatggccggtggtcggcgtccagcgcctcgtagggcaatgccaggtcggcattccagccggggccttgccagagcggcacgatcaggctgtggaagtgcgtgagcacggtgttcaaggagggttgggaagcgctgggcattggctggcgtcgtcacggcaggggtgtaggcgcgcatggtagcaggcttgggttctgtggtgtctggtctagcgctatcgggggcaagccccctcccacaaggtggtacaggctttctagaatat

SEQ ID NO: 22 - DNA, 192070 bp, Pseudomonas nodulensis
ctcccacagttgaccgcattgccaaggtgggagggggcttgcccccgatgaggccgtcaaatacgccgcaaatcagcctgccaacaaccagaccccggtcgccgccgaagccgcccccgcaacccgcaccaacggcgccgccgccgccggcaggaagcgcaccaccgcgtaaccggcagcatgcagcactgcggtcgcagcaacaaaacctgccgcgtacgcccacgggctggacatgtccggcagctccaaaccatgggccacgccatggaacagtgcgaacaaggctgtcgcgccgaccgccacgaacaacggcggacgcaccgccagcgcgactgccaggcccagggccagcaccgacgcggcaatcccgctttccagcgccggcaacgccaggccttcaaaccccagcacgccgccgatcagcatggtgcccacgaaggtgcacggcagtgcccagcgcgcggcgcctttttgttgggcggcccacaagccgacggcgaccatggccaacaagtgatcgataccgctcaggggatggctgatgccggccaccaggccgttgtcgccgtggcccgggtgggcgaaggccagggcaggggccagcagcagggcggcggcggtcagcagtttcttgaggttcatggacaggttccttatgggttgatcaggcggcggtcagcaggccttggcgttcgatgaaggcgacgatgtcatccaggccgacgccggttttctggttgctgaacacaaagggtttaccgttgcgcatgcgggtggtgtcgctgttcatcagctccagcgaggcgccgaccagtggggccaggtcgatcttgttgatcaccagcaggtcggacttgcagatgcccgggccgcccttgcgcggcagcttgtcgccggcggacacatcgatcacgtagatggtcaggtccgacagttccgggctgaaggtcgccgacaggttgtcgccgccggattccaccaggatcaggtccaggccggggaagcggcggttgagctggtccacggcctccaggttgatcgaggcgtcttcgcggatcgccgtatgcgggcagccgccggtttccacgccgatgatgcgttccggcgccagggcctggttgcgcaccaggaagtcggcgtcttcgcgggtgtagatgtcgttggtgaccaccgctaggttgtagcgatcgcgcagcgccaggcacaaggccagggtcagggcggtcttgccggagcccaccgggccgccgatgccgacgcgtagaggttgtgcgttcatgtgtgttgtctcctaggaacggaacaggcggctgtattggcgctcgtgggccatgcacgccagggacaggccaaaggcggcgctgccgagttgatcagggtcgatgcggctggcgtcctgctgggcgtgttgcaacagcggcagcagttcgctggtcaggcgttgggcggcttgctggccgagcggcagggttttcatgagcaccgccaattggttttccagccagctccacagccacgcggcgagggcgtcggcggggctgatattccaggcgcgggcggccagggcccagcccagggcgaggtgaggttcggtgcactgttgaagaaaggtgcgggccgcgtcgtccaactcgggcaggccattgagcagttgttgcagggagtagcccatctgccggctttcctgatacagctcgcgggtttcacggctggcgcggtgttcttcacccaactgcgccagtcgcgaccaatctgcctccagggcggcctggcaatgggcgagcagcaacggtgcctcgaaacgcgcgaggttgagcagcaactggtcgctgatccagcggcgcgcagtggccgcatcgttgacgcggccgttctcgacggccatttccaggccttgtgaatagctgtagccgccaatcggcaattgcggactggccagacgcagcagcgcccaggctgggttcatagacgcacgccgaactggtgcagcttgggtgggtagttgaagtcttcatcaccatggcgcgaatgatgatggccgccaccataggcaccatgctccggctggaagggcgcttcgatggtttccgtctgtgcacccaactgttcgagcatggccttgagcacgtagtcgtcgagcaggcgcaaccagccgtcacctacttgcaacgccacgtggcgattgcccaggtgataggccgcacgggtcagttcgaatgcactgctgcaggtcacgtgtaagagttgttcaggccgggcgcacacgcgtacgacgcgtccgtcttcagcctgcagaaattcaccatcgtgcagcggtggctggccgcgctccaggaaaaggccgacgtcttcaccgtcggcactgaaacagcgcaggcggcttttgctgcgggcttcgaaattcagcagcaactcggcggcccagagggcttggggggcgattcggcggtggatcaccagcatcaggcagcttccagctatgagcgatgaaacagctagagcaaggggcttgccaacctcgtcgaggcgtaggaaatgcctgtaggtatgcggggtggcgccactaaatagggcgtgaagacattgcgtgtatgcgccaagttggtgcaagagattgcctgttgcacgcggggtgggcgttttcggattttccctacatggtctgaggaatcggcgttcatcaggttacctgcgagatctttagcctgtgcgtcgtgttttatccacagcgacgttcatcatgttcaagtcactttgttatctattcattgtcagcctgacgtttgtgctttctccggcctccgccaacttgcaacaccctgcctctttctccgtttcactgaaagaggcatccatcaatgatgtgatcgaccgtgcccaccaactgctgggaacgccctacaaatggggtggcacctcggcggatcagggcttcgattgcagcagtttcctggtgtatctgttcaagacccaagccaatatccagataccccgcacgacggtcgcgatgcaccgctccacggccccgaccatcaaacgcaacgcgctcaagcccggcgatgcggtgtttttcaaggggaatgggcgcggccaggtcagccatgtgggcctttacatcggtgaggacaaatttattcattcgccgcgtaccggcaagagcatccgcatcgattcgttgagcaacagctactggaacaagaactacaccacggccaagcgcttccactcggcgggatgatggcgttactcggtgctgcccaggccttgccagtgcttcaaaccgataaagatgaagcgcagttgctgggtgattttcgcctgaggcgtgaggtggtcaggcagggcctgggccggcgggtcgatgatgtcgggcagggtggcgaacacacttttaacgatcaggtcagccatcacgtgcaaaccttcggcatccaggtgctgcagcttgggcatcagggtcaggtcggctgccaggtcgcgggtgatgtcttcgcgcaaggcgccgatcgcttggcgcaccgcgaggcagccaccgtattgttcacgggccaggaacaggaattgcgaacggttggccgagaccacatccagaaagatccgcacggaggcatcgataatgccgcccatcacgaattcgttgtggcgcaccagacggatcgtggcgcggaaggtttggcccacttcgctgaccaggacgagcccaagctggtccatatcggcaaaatggcggtagaaaccggtaggcacgatgccggctgtcttcgccacttccctcaggctcaggctgccaaacccacggccacactccatcagatggcgggctgcgtccatcaaggcgaggcgggtctgttgcttctgttcggcgcggggcagcattggcaggcgggctttgtcggcaagtacagcgacgcactctagcaaaacagcttcgctggcgtcgaacttggcggggagggcttgcgtaacagtctctacaaaaagtcaaaagcccgatcggctgatcgggcttttttctgggccaccacggggttagctctgtgcttgatgcagttcttgcagacggtcagcgccgccttcggcaataccttgggtgtaggcacgctcgttggcttgttcagcgccaccttcaaccaggcctttctgttccagacgatcacggccaccttcggcgacagcgttgcgttccagcaggcgatcagcgccaccttcaaccagacctttctgttccaggcggttgcgaccgttttcggtcaggccttcggtgtaagcgcgtttgttggcgtgttccgaaccattttcagccacagcgcctttggcgtagtcacggttttcttcttcttgcgaaccgctgcgagcgacggtctggctgaaatgagcggcgtcggctttgacttgtggggtggcctgttcggcggctggcagggcaaaagcactggaagccaggatggataacaggacggtagcgagtacttgacgtttcatgatgggttgctccttgggagggcgataaagtgggtacagggctaatgctactctcgataagtcgatataaaagttcataaacacaatggtaataatcaacagaattgattgttctaggcggaggctctagaacgggcctctcaagcacgcggttttgcaccggtgtgggtattttcgacacgcgagtgggtaacaatggtgcggtgccgtagggtaaatctgtcgaagtggtcagaaaatgaggtttttcctggcaaatcgaggattgggttaaaccccgcgacggtttgccagtcgtagtcctataagctgtccttaaaggctgtcacccagccagtcgtattcaggagtcctgtgcaatgacgcgcacgcgtaaaatcgccgcttggagctgcgccagcttcgtgctgttaatcgccatcgtggtattggtcctggtgttctttgactggaaccgcatcaaaccgcccctcaatgccaaggtctccgaagagttgcatcgaccctttgccatcaatggcaacctggcggtggtgtgggcgcgtgagcccgatgaaggcggctggcgtgcctgggtgccgtggccccatgtgattgccgaagacctgaccctgggcaaccccgactggtcgaaaaacccgcagatggtcacgctcaaaaaggtggaactgcgcatttcacccctggcgctgctggtgcagcgcgtggtgatcccgcgcatcgacctcaccgagcccggcgcgcaattgcagcgcctggccgacggtcgcgccaactggaccttcacgttcgaccccaaggaccccaacgccgagccctccaactgggtggtggacatcggtgccatcggcttcgacaaaggccacgtgaccctcgacgaccagaccctcaagacgcaactggatgtgatcatcgatccgctgggcaaacccattcccttcggcgaaatcgtaggcgacgccgatgccaagaaggcgctggaaaaaggctccgcgccacaggattacgcgttcggcctcaaggtcaaaggccagtaccacggccagaaactcgacggcagcggcaagatcggcggcctgctggccttgcaggacgcggccaagccgttccctctgcaagcccaagtcaagattgccgacaccagcatcgccctggccggcaccctcacagacccactgaatctgggcgccctcgacctgcgcctgaaactcgccggctccagcctgggcaacctgtatccgctgaccggcgtgaccctgccggattcgccggcttattccaccgatggccacctgatcgccaagctgcacgagccaaccggcgcctcgttcagctatgaaaatttcaacggcaagatcggcaacagcgacatccacggcagcctcgcctacgtcgctagccaaccacggcccaaactcagtggcacgctggtgtccaaccaactgctgatgaccgacctcgcgcccctgatcggcgccgactccaacgcccagcaaaaagcccgtggcggtgacagcaagcagcccgcgaccaaggtgctgccggtggaggagttccgcaccgagcgctggcgcgtgatggatgccgatgtggaattcaccggcaaacgcatcgtgcacagtgccgatctgccgttcaccgacctctacacccacctggtgctcaatgacggcgaactgagcctcgaacccctgcgtttcggcgtggccggcggcaagctggatgcgcagattcgcctgaatggccgtaccacgccgatggaaggccgcgccaaactcaccgcgcgcaacttcaagctcaagcaactgttcccgactttcgaaccgatgaagaccagcttcggtgaactcaatggcgatgccgatatttccgggcgcggcaactcggtggcggcattgctgggcacctccaacggtgacctgaagatgctcatcaacgacggcgcgatcagccgtggcctgatggaaatcgccgggctcaacgtgggcaactacgtggtgggtcgcctgttcggcgataaggaagtgaagatcaactgtgcggcggcgaacttcggtatcaagaccggcctggcgaccactcgcctgtttgtgttcgataccgagaacgcgatcatctatatcgatggcacggcgaatatggccacggagcagcttgatctcaccatcaccccggaatcgaaaggcttccgcctgttctcgctgcgttcaccgctgtacgtcaacgggccgttcatcaagcccaatgccggggtgaaagccattccgctggcattgcgtggtgcaggcatggtggcgctgggggtgatcgccggaccggctgccgggttgctggcattggtcgcgccgagtggcggtgaaccgaatgagtgcgcgccgttgctgcagcagatgaaggaaggcaaggcgccgaaaaccgtgaaaggctaactgcaaatgtgggagggggcttgcccccgatggcggtagaccagtcgacatctcaattgactgatccaccgctatcgggggcaagccccctcccacatggggttacaggctttctagaatatccgccatgtcgtccgcatgctcttcttcctgcgccaggatctcttcgaacaggcggcgcgtggtcgggtctttatcaccgatgtactggatgatttcgcggtagctgtccacggcgatccgctcggcgaccaggtcttcgtagaccatctccttgaggtccttgccggccacgtattgcgcgtgggagttcttcgacagcaggtccgggttgaactccggctcgccgcccaactgcacgatgcgttcggcgagtttgtcggcgtgttcagcttcctgggtggcgtgttcgaggaactcttgcgcggcgacggcggccttgatgccgctggccatgaagtaatgacgcttgtagcgcaacacgcagaccagttcggtggccagcgacgcgttgagcaggcggatgatttcttcgcggtcggcgtcatagccctcggtcacggcaccgttttcgacgttctggcgggcgcggctgcgcagggtcgcaacgtcagtcaaatttgcttcggtcatctcaatctcctggggctaatccggttttgcgccacgctctgtcggcgtgatcgctccaagttgtgagtcctggagaaagcaaaaagttttattggatttaccgatagcgtcataagcccgacttgaggctgggctaggctggatggatcggattgagaggatgcccggttcatgccgcagtcgttggccacgcgctaccccctggtgttggtacccggcatgctcggcttcgtgcgtttgggctggttcccgtactggtacggcatcgtcccggcattgcgggcgggcggggcgcaggtatttcccgtgcaagtggcgccgctggactccagcgaggtgcgtggcgagcaactgctggtgcagatcgagcgcattcgccgcgaaaccggtgccgacaaggtcaacctgatcggccacagccaaggctcgctcaccgcgcggtatgcggcggccaagcgccccgagtgggtcgcctcggtgacctccgtggcaggccccaatcatggctcggagctggcggatcatatccacctgcattaccccgctgacggcgtgaagggccggatcatgagcgcgctgtttcacctggccgcctgggtgatgggcgtgctggaaaccggctatcgcggaccgcgcttcaagacggacttgcaggcgtcccatcactccctgaccagtgccggcgtggcgttgttcaaccagcaatacccgcagggattgccgcagacctggggcgggcagggcgccgaagaggtcaacggcgtgcgctattactcatggtccggcaccttgcagccgggcatcaccgaccgtggccgtaacctgttcgacggcacgaaccgcagttgccgtttgttcgcccgcagcttcgtacgggagaagggccagtgtgatggcatggtcgggcgctacagctcacacctggggttggtgatcggcgatgactacgcgctggatcacttcgatatcgtcaaccagtccctgggcctggtgggcaagggtgcggagccgatccggctgtttgtcgagcatgcacggcgcttgaaggcggccggtgtttaacgcactggggtggtccagcgctccgacaagatcaccccgcccaaggtcagcaggccgcccaccaggtgatacagcgccagttcttccttcagcaccacggcggcgatcagcgcggtgatcaacggcagcaggttgaaaaacaacgtggtgcggctcggccccagggtcttcaccgaatgcatccaggccagcggtgccagcatcgacgccagcaggcacgcatacaacaccagcggaatattggcccagcccaggccggccttcgccgagaacaggaacagcggaaacagcaccaccaccgccaccagcacctgcagatacagcagcaccagcggcggcaggcgcagttgccatttcttcagcagggtgctgtagaccgcataggccagggtggcgaccagcatcatgccgtcacccaggttgaccccgtgttgcagcagtgcgccgaggctgccggcggacacaaccaccaccacgccggcgaatgacagcaccgcaccggtcagcgcgccgtaggtcaggcgctggccgaggctgatgatggccgccgccagcgccatcaatggcatcagtgacaggatgatgcccatgttggtcgccgtggtgagcgacgcggcgtagtaggccaggctctggtacaccgccatgcccagcacgccgaggatgaacactttgcccaggttcgggcggatctgcgcccagtgggcaatcaccggcttgagcatgaatggcgtaaacagcagtgccgccagcagccagcgatagaagccaatctccgccgggaagatcgagcccacggccagtttgttgacgacggtgttgccggcccagataaaaatggccagcaagggataagcgtattgcatcgaaaggaacccggtgtgtagatgaggcaggattatccattgtctggatcgaagcctatactgcgatccagacaacccactgctgtatccagacaacatggccaagcacaacgtacgcctccaggatttcccccaactgccgagcccggtgtattttcgctattcggatttcgcccccgacaccgagtgcacgccgcaccagcatttctggggttcgctggattactccgccagtggcgtgatgcgcatggaagtggccggcagccgcttcatgtctccgccgcagtacgccgtgtgggtgccgccgcataccgaacacagctcctacaatgccgaggcaattgtctaccactcggtggggctggccccggaactctgtgagcaattgccccggcagccgtgcaccctggccatcagcgatatcctcaaggccatcctcagtgacttcgcccagcgcgatgtgaacatgccgcagaccgagtcggacatccgcctggcccaggtgctggtggaccaactcaagcaggcgccgatccacgagtgcttcctgccctacgcccgtcaccccgggctgctcggcgtgctggaaggcatgcaggccgaccctggcgataaccggcccctggcgcactgggccgagcaggtgcacgtgagcgagcgcaccctggcgcgtcagttcgtgcgggaactgggcatgagcttcggtgaatggcgccaacgcctgcgttacctggccgccatcgaggccctcgacagcgagcgcagcgtgcaacatgtggcgtttgacctgggctacagcaccgcctcggcgtttatcgccatgttccagcgccaggcgggatgtaccccggagcagtaccggcgcgcccatattcgtagtcggtgaagatgtaacaggctttgactacactgctggataggccgtgcccttcggtgcggtaacagggagaaaactccatgaagatgctgcgaattccgctgttgatgatgggcttgctgctgtgttcccaaggctttgccgccaccgcccagcaaaacaaaatgaccacctgcaacgccgaagccaccaccaagacgctcaagggcgacgagcgcaaggcgttcatgaagacctgcctgtcagccccggcggcgaatgacgccaagaccctgacaccgcagcagcagaagatgaaggattgcaatgcgtcggcgaagaccaaggcgctggccggggatgcgcgtaaaacctttatgagcacctgcctcaaaggctgatcactctttcgcgagcgccgcagatcaacggtgggagccgggcttgcccgcgatacaggcgcctgggtctgtctggtacaccgcggcgaggccatcgcgggcaagcccggctcccacacttgatcgcattcacaaccgacccactcgcttgattccctcaaggctggcagactgcccatcctttaacgccgttcgttttgaggctgtatgccaacgttttctcagcgtcacgtgctattgctggccagctacatcatcatttttggcgggttgctgctggtgctgccgctcaaactgctgcccagcctgctggccggcctgttggtctatgaactggtcaacatgctcaccccccaactgcaacggctgatcgaaggccggcgcgcgcgctggctggcggtagcgttgctcggcacgttgatcgtcagcgtcctggcgctgatctttgccggcgccatcagcttcctgctccacgaagcggaaaaccccggggcgtccctcgacaaattcatgggcgtggtcgaccgcgcacgcggccaactgccgccgttcctcgacgcctacctgcccgccagcgccgccgagtttcgcgtggccatcggtgactggctgagcaagcatttgagcgaactgcagcttgtgggtaaggatgccgcccacatgttcgtcaccttgctgatcggcatggtgctcggcgcgatcatcgccctgcagcgcgtgcccgacctgaccaaacgcaaacccctggccgccgcgctgttcgaccgcctgcacttgctggtccaggcgtttcgcaacattgtcttcgcccagatcaagatcgccgcgctcaacaccgccttcaccgccgtgttcctcgccgtggtgctgccgctgtgtggtatccacctgccgctgaccaagaccctgatcgtgttgaccttcctgcttggcctgctgccggtgatcggcaacctgatgtccaacaccttgatcaccattgtcgcgctgtcgctgtcgatctgggtggcggtggcggcgttgggttacctgattgtgatccacaaggtcgagtacttcctcaacgcgcggatcgtgggcgggcagatcagtgccaagtcgtgggagttgctcttggcgatgctggtgtttgaggccgcgtttggcttgcccggcgtggtggcagggccgatttactacgcgtacttgaagagtgagctgaagctcgggggtatggtttaagccttgtattggccagtctggcctcatcgggggcaagccccctcccacattttgatctgtgaacacattcaaaggtgggagggggcttgcccccgatgggcgcgccgcggtgtttcagataaaactcagctgccgtagcgcttgctggcctcaatcgccaagccgctgccgatactgccaaagatgttcccttccacgtgccgcgcatttggcagcatcgccgagatgctgtggcgcagtgccggaatcccgctggaaccgccggtaaagaacaccgtgtccacctgggccacgctcaccgaggcatcgttgagcaactgcgtgacgctgttgcgtacgcgctccagcaggccatcgatggcggattcgaacaaggcgcggctcaactccacgctcaagccgggctcaacccggtccagcagcacatggcggctgtcgtcgtgggtcagttggatcttggtttcttctacttccatcgccagccagtgcccggcgcgctgttcgatcagtttgaacaggcggtcgatgccgccggtgtcttcgatgtcgtagcgcatgctgcccaacgccagctgggacttttgcgagtacaccgagttgatggtgtgccaggtggccaggttcatgtggtggctggtgggcatgtaggccccgctcttcatgcggctgccgtagccgaacaacggcatcatgccgttcagcgagagctgtttgtcgaagtcggtgccgccgatatgcacgccgccggtggcgaggatatcgctctggcggttgtcgttgtgacggcggtccggcgacaggcgcaccagcgagaagtcggacgtaccgccgccgatgtcgacgatcagcaccaattcttctttctcgatggtggactcgtagtcgaacgccgccgcaatcggctcgtactggaacgagatgtccttgaaacctatcttgcgcgccacgtcgaccagggtgttctcggcttcctggtcggccatcgggtcgtcatcgacgaagaacaccgggcggcccagtaccacttcttcgaactcacgcccggcgttggcttcggcgcggctcttgagttggccgatgaacagcgccagcaggtcggtgaacggcatcgcggtgccgagcacgctggtgtcgtgcttgatcagcttggaacccagcaggctcttgagcgagcgcatcagccggccttcgtagttttccaggtattcgtgcagggccaggcgaccgtacaccgggcggcgctcctcgaagttgaagaacaccaccgacggcaacgtgatcttgtcgtcctccagcgcgatgagcgtctcctcgccggggcggatccagccgacggtggagttggacgtgccaaagtcgatgccgcaggcacgggctggggatgggtttttcatgtctatcgggttccggttgaaaaacggccgcgcagtgtatgccagtcgaaggcggatgcgtaggccgactatccgctaaatcgcgcttgaaagttgggtatttgcccccacatctgttgcatacggcaagtgccgataacactttgacgcacccccaggccacatcactcgacaagtgcaatgcagcgcacgttgtgcccagggctgtgcgatctcgattaaggatggtgaaccgccgatggatttcaaagactattacaagatactgggcgtagagccgaccgccgacgacaaggaaatcaaggcggcctatcgcaagctcgcgcgcaaatatcaccccgacgtgagcaaggaaaaagacgccgaagccaagttcaaggacgcgtccgaagcctatgaggcgctcaagagtgccgacaagcgcgccgaatacgacgagctgcgcaaatacggccagcatggccaaccgttccagggcccgccgggctggcagagccgtggcggctttggcggcggtggtggcggtggtggcggtgaggacttctcggacttcttcagctcgatcttcggctcccgtggcgacgcttttggtggcggccagcgccggccagccgggcgcaaaggccaggacgtggagatgcagctgtcggtgttccttgaagagacgctgtccaccgagtccaagcaggtcaccttccaggtgccgcagtacgacgcgtcgggccgtcacgtgagcaacaccaccaagagcctgaacgtgaagatccccgccggcgttaccgacggcgaacgcattcgcctcaaggcccagggcgcgccgggcattggcggtggtgcgaatggcgatctgtacctgatcatcaagttcgcgccgcatccaaaattcgaagtggatggcgaaaacctgatcatcaacctgcccctggcaccgtgggagttggcgttgggtgctgaagtacaggtgccgacgctgaccggcaagatcaacctcaaggtgcctgccggcagccagaacggccaacgcatgcgcgccaagggccatggcctgctgaacaaggccgggcagcgcggcttcctgttcgtgcagctcaaggcggtaatgcctaaaggcagcattgatgaggtcaaggctctgtggcaggagctggcgcaaaaggcggcgttcaatccccgcgaaaacttctgagggcgtgaacgcctgggcgcccgttactgcgggcgggaggcgccgggttgctggtgatcgccgccgtgcggtgtcagctcggccacctcccggcgtgacagctccagcagcttgaggttacgttcggtggcctgctcgatttccagccggttcaaggcctcgaggtaggcgtcatcaaagtcttggtgtgcatcttccagggcgttctgccgtgcgtcggcattgcgcttgagggtggcgaactcgtcggcataccgctgcttgaggtagtccacccagtagtcccggctgatcaggtcctcgtaaaacacctcactgcgttccgcgtcgagaatgttgcggcgcgcgtcggccagttcagtgccagtgattggccggctgaaccgcatgtggcggggttgcccaggcagctccagctggtccggccatcccctggccagtccgatgcggtacgacaagcgcacttccgccacgtccgagtgtgggagcagcgtcctgtcggcctcgacttcggctctgcccagccggaacaactgccgggacaggttcaacagggccgcacctctcagatccagccgcgccgtatcgacgttgagcaacgcgttgtgctcgtagaccctgacttccagcccgctgaaggtcaggatgcggccatcgacgcaggtgccgtgcgtatgggacatggcgaacagcgcctggcgcagttcggtgttatcggcggccgcttccagcacgttgcgtacccgctgcgacaggtcggcgcgagccgcgccgaactccgtagtgtcctgcaaccgttcgagcaggtgaaaaaacgcctggtgatccggttcggcctgcagttgtgtccagatctcccgcagcctgccttgctcaggaaggggcaggtcgtctatccaaggcaccggttgttcaggtagtgcgggttgcgccgggagctcttcgtcgggttgttcagggaagatttcatcgggctctggtgatgacgggagcccatcgtccagcattgtctggatgtcccggcgtgacaggcccagcgccgagtcacgccccgtgcggtccagatactcgataagcgccgtcaggctgtcgtgcgacaaggggttgtcggagatatctgtaccctccatcaaggcatcgtggctgccatccagtgcttcggtcgggattgcactgatgtcattggcgctcaggttgagcgtgcgcagatgaccggcttccaatgtgccggccggccaatcggtgaggcggttaccgctcaggttcaacacctcgaggggcgagccaggctcgagactgaaaaactccatcaggttgtcgctcatgtccagacgttgcaggtttggccagtcatccaggccgatggccaactcatcgtcgaatcggttggatgacagatccagctccctcaactcaggtaattctgcgagtgccctgggcaagccctgcaactcgttgccggtcaggcgcaatgtgcgcaggttggaaaagcctgcgaggaaaccgttggagccttgttcggcgaacaggaggccgctcaggtccaggtgatgcacatgggaaaagtccgccgttaccaccggcaggttgtccagttgcaagccgttgaaactcagggtctggcccgccgggtccgacgccagcccctggcgccagcacgtgacgatgcgttgcgcggcctggttgcggcgactggccacggaccagtcggtggctggcgagcctcgcgtgtacagccagccattgagctggcgtatcagggtgtgcagggcctcattccagacgtcgatcagagcgtgcaagtgcgtgtcactggcgccgcctgcgcgcaggcgtgtcagccattgctgtaacgtctgctcatccatgccgtgctgcaaacgttgcaggcgttgcggcaggggcaggccggtgtcggcggtgggcaggtcgagcaggtggcgggccaatgaggctccgctttcggcctcggggaatacgttggtgggtggttcctcataggcaaaacgctccagggctccggcgggcaggccccgggcggtttcaacccgctgtcgggccacagccagcgcgccttcggaaacctggctcaacggcgtaccgaccacgttggtactgagcagcagctcgtctctggtcaggattgcctcgggcaacacggtgatgcgggtattgcgcaggttcagcgaggtcagttgcgccaagtcctcgagaccggtcggcacttgctgcaggttcgtttctcgcaggttcagcgtcctgagtcgtggcatgtgatcgagctcaaggcgcgtgaggggattgccttgcagcgagagatgttccagtgcgacgaagtcctggagctcggagggggcggcggccagctcgcagtagttcagttcgacagtgcgtgcctgggtgaatgcccggacgaaacgactgacctgctccatgggcacacgcaggttcatcaggcgcaaggctagggtgtgggggaagctgttggccggcaattcgggcaggcttgaggggctgaaaccgcgtagatccacttccagaaatgagcttggccgcgcgcgcagtgggtcagccgccgcgtagaggttgagcagcccgcgactccattgcacccgcaagtaaccgcccatccatcgttggtttgcgtgttccaccgcgtggggaggacgcagccactcgttcagccgccggtcgatttcactgtactgttcgctcagcgcctcaatcgcgtcaaagcgggcgcggtgaccgacccagcgttcggcgaagctgttgatcaacacctgcgagtcccgagcgggctccgtgaggcgtgccagttccccgacacagtaaatccgcaccatttcctctaggtcgatcaagtgatcgggttggttgttcagccgggtatagagcgctctgaagctgtcgcgcgacattctcgaccagtccagcgagaggccggacagcaggcgctggtgaccttccagcaattcggccggaatactctggataccggtgccgcgcaggttcaggcgctcgagctggggcaggtcctgcacgccaaccggccaatcggtcacctgagagccgactatttccaactggcgtagccgcgtcaggcggctgacatccagactgggttggtgagtcggcgcaaacacgttgttgttggcaatgctcagctcttccaactggctgagcgtgcccagggtgttgatgttttcggccgagagcggtgaaaagagctgcaatctcgtcagtcttggccagtgtgtcaatgtctcgagctggttgatgctccgcgggccggtgacgaagatatgcaggctttccacgctggggaacaagccaggcaattgctccagcggttggccgtgggtgaccaacacgcgcacatgggaaaaatccgccgtcaacggtggcaacggggcgtcggtggtgagttcaagtctagcggctgtctgcacgtcactggcgaggggcgcattgcgccaactggccctgaggttttcggctgtggtattgcgcagcatggcttccagtgaggtgggcggctgcgttgcaacccactgcgccagtgtgttttccagggttccccattcacgcccgcgtgcctgcaacagcccgtagatctgcgcgtcggtttgcccggcgcggcgttgctggaggataaagccgttggcctgctcgtcgctcaggtcggggtacaggtcttgcacgcgcgtgaccagcgacgggtccatgccggcgccacggccactggcgtagtaaccggcctgattcacgcggatgcgcgcaggcggcttgaaccgcgtcgcctcaccacggggctggcccagccactgcggcgccaggtgacggtgctcgaccgcactgcgaatgatgctgcgctgcaactcggcctgctggcccacatggggaacacccaacgcctggcgcgcttcgtcgggcagggcatgcagcaccgacgcgtaaaagttgtcgccatacctgggcaggctgttgagggcctcgccgcgctcgtcgaacgcctggtagaccgggcctttcttgaccaggaatttgcgctgcatcgcgtgctggttgccgatggcctcgatcagccggccacctacgtgttcatcgcggatttccaggcgcaccgcgtccgaccagcccggcagtttctgcaatgcgtgcagggccaggcgcttgctgtcggtggtcgcgatgtgatccgtgtgcagcccggcataggcgcgggcctggcgcccttgtcgtgcataccagcggccttcttcgagcaaggccagcggcactttgccggtgctctccaggcgctcgagggcttcggcactggcgtggaccaggatgtcttgcgctgctggcttgctcagccccggacaggctttttgcaattgtgtgatgcgcaggtcagtgggtttgggcccttcatagagactttcgaaaatcgctgatcgacgggtctgcgcaaagtcggcgatctgttttctgaactccaccggccttgcctcgcgcacccgtgccgcctcgccaccgagcaggccggtgatctcgtcctcgtccagcgccgccaggatacgccccggcagcccgctgcccagtacatccgcgcggctcatacggatgggcgccctggcgcgcacgccggcatacaagcgctcggcgccgtactgaatggatttcccccgcaggctcggaccgtcaaagacctccagcacccgacccgccggccagcggggcaactcagtgaccagcggcaggatgtacagataacgctcgtccaccgccgtgccggtctgcacctggctgatcacctcttcgacgcccctgtcggcttcaaacaggcgcatggcatccgtcaactcgggcggcggtggctggttgtccaggtggaccttgcgcagggtgttatcgctgacgccgctgacttcggcgatcttcaacaattgctcgtcggaatactgttcggtcgcgttgccgaaccggcgtagcagcgtgagccggtcccaggccagtgggcgttccagggtgtggcgccaggccccttgcccgttgtgccgcagcagcggctgataggcatccggatcactggggtgctgaatgcgccactcgccgggcggtgtaccttggcttatttcgtagtgcttaccgtcctggcggatataggttttgccgttgaccgcataacgtccctggggatcggggctggcctcgggcgccagggcaacgtcgcttgcataggcgttcaggtcgggcttccacaggcgggtttctccgttgggcaaggtgactgactgcaacccctcgatcaccggttcagccggtaccgccgtcaatttggccaggcctcttcctacccccacttgagcagcaagcaacaccaggttctccgccacatcaatcaggtgagccttggccgctttgcgatcaccttcggaccactccttcacaccttcgaaggtttcgtacaggagctggccggccatcacggcgatcatgacttcacccagcaccggtacgaatatcgacaccccggtcaacagcagcatgccgatattgagcagcgccgccaatttgcgcgaacgcacggtggcatccacttgcgcggtcggcacggcgtggctgcgggcgtcggcgtagactttggcgcggtgttgctcgtagaggtaggtccacaggtcgaagttatcgatccagaagataccgctgtgcacgggcgcgataacgacagggttcaggtacggatcgtcgttggccacctgctggatcgggttgggcggtggcagggtgttgacccggctgaacagggaaaacgggtcgagcccctggcgtatctggtccagcaagggcgcatacggggccaggtcctgggcaaccgtggtttccgaggtgtcctgggtgaattggctgaagtagtccgcgcggtcggcgtaatcgacgaactggctgaaaaaacgctggtaggcgctggggctgccggcggtggccgggggcgtgtcgcgggcggtgaagcgctctttgaacagtggcttgagctggcgcaaggtgtagcgtttgaggggcgattgcggatcgtcggggatgtacagcagcaactcgctcgcgttgtggagctctccgctgaccagaaataccaccacgcccgtgagacggtgcttcatcaaactcaagtcgcgaaaccagatgcgttggccgttcagcatcggttcggtttcgccgccgaccaccgcgagcaccatgcggtagtccgcgtcggtgatgtcttttttcagcagggcctgttcagcggcaacgcgcagggaggccttgtgggcggtgatgaatttgtcacgcactacggcctgcgtgaccgcgtctttgggctccaggtaatccttgaggtaggcctggtacttcgcgccgatgtccagtgagcggcacagcccagtgaattgcgccacggtcagtgatgtagacactgcgtcgaattcatctccggtcttgaccacgaaccccgacgaagggtgaaaggcgttggcctcacattcagcctcttcgaagttgtgcagggcggcttgcagcagaggcagcttcagggcttcgaaccaaccggccgtgatcgagaaaacgccgacggtgatggattttctgagcctcagaaaggttttatcgacatccagctgcaccttgaactgatcgttcaacgcctgggtcaacaggggccgggcaaaggtgtcgatgtcttgcatcgcggacatggccttgtccagtttgccttgcgcagtgaagcttgcggtgatggcgtcttgcagcgatttgcgttgtgctggcgaggcgtgctggtaccaatcgggcgtcgtcgcgggcgtcgttttcagggcttcacgttgctgcgcagtggcctgggtcagccaatcgggaatggcgttttcgagaaagggggtgtgcaggctttttgaagcgggtgaagccgtcatgctgtctctccttgggtagtggagcagacagcagatcacttcggcaggcgcggctagcggtagatagagaacaccaccgaaggctggcgccagggcgggcaaccctggcgccgggtggtcaggtgatcgggttggcgcgcagctccgtgcgggtcagtgtttcaatcaggttggcttcctggatggcaagctgggcctgcaagtccctggcctgctgcgcgtagtcggcgtcgcccagcgagccttcgacatgctggtcatgcagcgctgccaggcgctcatggaagggctggccctgcgcctcgaattgctcgcggtacttctgggtcaagtactcctgccagaattccctggagatcagcgcctggagttcggcgggcgaattgttcagcttgaggatgttgtcgcaggtggccttcaacacctcttcactgacccggcccaggccgatgaactgcgccgattgcggttgtcccggcaaatcgagtctggttttgtctttgagcccgaatcgataggcgagcctgatttcaacttcctcgagcatggcgatctgctcggctttctcctgcgccgacaaccttgggttgttgttgatcgcctcggtgcgcctggcgatatcgttgagcgcggttttttccacctcgtcgagacggaacaagcccctggacaatttgatcagtgcggcgccttgattcacatcggcagccagggtcttggcgttgtgcaccatggccatgacttccacgttgctgaacgacagcccggcgcgatcacagcaggtcgcgcggcctgcccattcgaacatctgctcgcgcaacgcggcggattcttcggagttttgtgtgatggtgtcgatcaccctccacacccgttgttgcaggtctgcatggccgccgcgaggttcactcaggccttcgagcatagcgaagaaaccgtcactgccaggctgttcgcgcaattgccgccactgggtttgccgggcggcgacctggtcctcggccaggtcttgggtccagcgttgagtctgcgtcggctcgatcatcacatggtcccgaatgcgcggcggcagaggtgtgcgcgccggggcgagtgccgagatgaccagttggttcgggtggtcggccgaggccaggcctgcctgttcaagcctggccctgtagtcccttagttgctggcgcgtctgctcggtcaacgggttgttgttgagttcgattttgtgagtgagctgcacggactgcgccagttgcgcgtcgggtgggttgatgagcgagccgggcagttgggtgatgcggttatccctcagcgcgaccgtgtccagcaagggttgcgcgcctaaccctgtggggaatgtctcaagcccgcagttttgcaggcccagcgtacgcatatcggtgaacacgctgaagtccggtgtaaggcccagtgggttgtttcccagcagcagcgccctgagcgtggttcgccgggccagcacttgcgcggtttcagcggtcaatcggatctggttgttctgcaggaacaggcgggtcaacccgttcatctcattgagcgccatcggcaactcgcgcaactggttgtttgacaggtccagccagcgcacgccgctatggcgtagcaggaactgctcggggcaggtgctcaggtgcatgttgctcagtttgagtgagcccacgtggctgaaatcggcgtccagttcgggcaggctcggcaggttgaggccgctgaggtcgagttccaggccaatggctgtcccatcgttggcgtgttgtgtcggcgtttccttgcgccagcacttcaggaccctctccctggcctggtagcggtcatccaggtcgatgacattcagcaagcgctgttgcgtgcgcacgtagcctccgccggtgcggctgttggcattgccgcccgccgccgcccaggtattgagttgtgtgttgagcgtctcgaactcttgctccaagcgcaagagttcggtgttggcgccgtcacccagggcccagatgaattgccgggattccagaatactgcgcctcgggtacagcgcccgggtgcgttcaagctgcgggttttgcatatcgaacacatcggcggttccgatcaggtccggacgctgttcgttcaggcgcctccaataggcgtcgaagcgctgggcgtattcttgcgggaatgggttgcctttgaggcgggtgactccgttgatcctcgcgatggtttccagttgctgcggttgtggggcgagattggcctcgggtatttcgcgcaggcggttgttgcgcaggtcgagcagttgcaggctggttttatcctgcaggccggtcggccactgatcgatcccggtataggacaggtccagtgttttcaaacggttcaaggcgctgacgtctggagtgatgcccaggcggttgccgctgagttccagggtttccaactggtgcaggcggctcagttgggcggcgctctgtggggtcagcatgattttgttcgctttcaggctcaactgggccagctggggcattgcgtcgagtccatcgggtaacgctgcgagttcgcagccatccaggctcagggtcttgacctggcggaagttgttcagaaacgtctgggcattgcccgaccacattttggtgttcagctccagtttctcgacgtggctgaagtctgccgtcagcgcgggcaggtccactggcataccgctgatgattttcagcgtattgcccgactcacgacgccagcagcgcttgatgtcctcggcgatcacccgggcgtagccgccagcccggtcgtacgcagtcaccaccaggcgcggtggattggctttgacccaagcctccagatcagtttcgagcttgctgtactcggcttcccgcagcctcagcctggtacgcacgtcgctgcccagtgattcgataaaggcgtcgatttgcgcatcgctgaaagaggggtagagcttgcgcacccgctgcgctgtgctgcgaaatggcgccaccagtttttcgtaaccgcgaccgccgcccagtaaacgcatggtggtgtcgtaggccggcttgcgcaccgggtgttcgagcaacacgccgcgcagtgcctcgcgtggcaagggggcggcctggatggcagcttgcaactgtcgggcgtcggccagccgaaggtcctggcgttcacccgatgacagcgcgtccagaatggcctggtacagatccgtagggcgaggccctttgaattggccgttttctagctgcaccaggattttgcttgtcgtggtgtccagctcgccaatggcatcgagcagcggaccttgggcggagtgctggcgcagttccatgcgtgctccgcgacgccagccaggcagggtctccagggtgcgcagggccaggcgctggctgtcgaggtcgtacggggtgttcaggtgcaggttttcataggcgcgggctacccgggtttcttgttcgacccattgcgccgtttcggcgagcgtgtctggcaggcgcccagtgcgacgcaaggcgagcaggtcttcggcgctgagttgggtgagcaaatatgctgcgatcggtgtcggcagtttggggtaggtgtctttcaagcgttgcacgtccaggtcggtgttggccgtcagcttttgataacgctcctccacctgtgccgccttgaaccgttcgacaaaatcacccagctcccggcgcaatttgccggcccgcattgcaagcgtgtcctggggcgagccggggatgtcgaccagttccgggtcggtgccttgtagcgtgttcagcacttcacgcagtccttcgccgcgtgccagttgttgcgcggtgaggagtaccgtgcgcctgcgcgatgacggtgggtagggttcgtcgtcccatacgatgcgcccctcatggtcgattacccgcagcgtcggggagctggacagcaggccgcgccgcttcatcaagtccagttgtgtgcccaggtccgcctgggggtagacctgagggtcggcgcttttgagctgttcgatgaaggtggtgacctgctgatgaagcctgaaacgctgcaacgagtcggccagcagcaggggcacgttttcggcgttggcatgggcttcacgcaaggcgttggcgctcaccccgctggcttcttgggccttgaacaattgttcgtcatcgagggcctcggcaggcaggcccaggcgccgtagcaaggtggtgtcatcccaggccagtggggtttcgccctcgtggtgccaggcgccttcgccattgtgtgtcagcttcggtgcataggcgtcggtacgggtcgggtgctggatgcggtattcggtgccttccgggtcctgggccacgcgataggtccggccttccagcggcagaatcctctgcccgtcctgggtgtacaagccatgcgcatcgggccgggcatccgccgccagtttgacgggcgatgcataaggctccaggtcgggtttccacaaacgggtcttgccgtcggccgaggtcaccggttgcaattgctcgaccaccggctcggccggcaccgcagtcagcttgccgaggcccttgcctgcaccggccagcacggccagaaacaccaggttctccgccacgtcgatgaggtgggccttggccgccttgcgatcaccctcagcccattcctccacaccctcgaaggtttcatacatcaactggccggccatcaccgccatcatgacttcgcccagccccggcacgaatatcgacacgccggtcaacagcagcatgccgatattgagcagcgccgccagtttgcgcgagcgcacggcggcgtcgacatccgccgtgggcacggcgtgactgcgggcgtcggcatagactttggcgcggtgctgttcgtagaggtagtcccacaggtcaaagtcgtcccgccagaacaggccgctgtgggctggcggcgtgataacagggtgcaggtacgggtcttcgttggggacttgcttgggtggcggtgacgctggcaaatcgttgacccggctgaagatggaaaacgggtccagcccctggcggatctgattgagcagcggtgcaaagggggccaggtcctgggacaacgtggtgtccgaggtgtcttgggtgaactggctgaagtaatccgcgcggtcggcgtaattgacgaactggctgaaaaagcgctggtaggcggtggggttgccgtcttcggccgggggcgtgtcgcgggcggtgaagcgttgtttgaacaggggtttgagctggcccagggtatagcgcttgaggggcgattgcgggtcgttggggatgtacagcagcaattggctggtgtcgtgaagctggccgctgagcaggaagaccaccacgccggtcaggcgatgcttggccaggctcaggtcacggaaccagacgcgttggccgttcagcgtcgggcgggtttcgccggcgatcaccgaaagcaccatgcggtagtccgcgtcgttgatgtcttttttcagcagggcctgttcggcggcggtgcgcagggcagccctgtgggcgacgacgaagtgtttgcgcagcaccgtcgctgcgagtgcgtccttgggctccaggaagtccttgaggtaggcctggtactttgcgccgatatccagcgagcgacacaacccggtgaattgcgccaccgtcagcggggtggataccgcgtcaaagtcatccccgttcttgattacgaaccccgacgttgggtgaaaggcgtcggcttcacattcgtcctcttcgaagttgtgcagggccgcttgcagcagcggcagtttcaatgcctcgaaccagccggcggtgatggacgcgatgctgacggtgatgggtttcctgagcctgaggaaggtcttgttcacatccaactgaaccttgaaccgatcgttcagcgccttgaccagcaggggcctggcaaaggtgtcgatgtcttgcagcgtggacatcgccttgcccagcttgccttgcgcggtgaagctggcgacgacgctgtcttccagcgtcttgcgttgcgccgccgaggcctgttgataccaggcgggcagcgcggcatccgagtgtttgagtgcgctgcggtatgacgaaggcacgtctgccagccaggccggtatggcgtctttgaggaagtcatgatggcggctgtcagtgacggatggagactcaggcatggtgtcgctcctgcaatgaatgagggagtcgacagcacatcatgcgcccaggctcgggcagcggtagataggtagggccgacggccggcaggcgcgacttaggattgcgcgattgtcagatcacacggtagtcacctcatgtccgagccaacctccccacctgcacccattgaacaaggccagcattacgctctgatcaaacaggcgattgcgccgtgcctgagccaggcgtcgccctcgcgtcgcctggcgctcaagcaaaccccggcacagattcccgattggtatgccgccgcctctcaatcgcgcaaagaccaactcaaggcgttgctggacgcacgttgcacgtcgctcaacgcgttggaaaagtccctggcgaagctgcagtcggtgacagccttcgcccagccgctgctggaagcggcgctcagacaggccggtttcgaactggacgtcaatcaaacctggttgcgcctctactatccggtcgaagacgcctttggcgtggcgaccggcgggttcaggaccaagacattctcgttgttgcaggcggccttgaacaacttcgaggcgcgggaagcccgggccgggtttttcaatgcgtcttccgggttcatcaccacgcccgatgcccggggacaattcgagcggcatgccacgacgctgaagatcgagacgtttgcccagctgtgccgtggcctggacctgggcgcgaagtaccaggcccatctcaagtctttcctgcaaccacaggatgcggtcgccgaaggcgtgctgcgcgagcgttacttgaagcaccagagggcggctttcgaagcggcagcctgcctggccctgctcaagggcgatatcgatgacagcgaccatgccctgttgatgcgcgtgctggccggcgagcggcagatcatgctgggcgacaagcaggtgtggtaccgcgtgccctgcctgatgaacctgcacctgcaggattgcctggtgatcgacccttgcgtcaaataccgctactccacatgggtgatcgtttatatcccggacgaccccgaccacccgatcaagcgctacgcctcctatgacgccttcagcaacgccatgaccgaccggctcaaggctgggccggggagggctgctgatcgctctcaagtcgcaccggccacggactaccagcgcttcatcagccagttcgttgcctaccagcaccggccctactactttcgcaggctcaccgagctggtgctggatgcgccgccgcagcccttcgccttgcaatggatacgctcggagtggggccagtacatcaccgagctcttcagcccaccggccatcacagggattgcctcgatcttcggcgattcccagccccaggggcgcgtaccgatcagcgcacctgaattcgatgtcaatgcggtttcgatcaaagggctctgggaagaagtggacctgtggccctatcgatacgaaaacctgcgtacccggctgtacgccgatgcacgcgcccaggccgtgagcaccgcggatgccgacgaagccggacggtctcggcgcctggagcactatctgaatatcggtttgtttggcgtgaacctgctgggcatggtgatcccaccgctgggcgtggcgatgtcattggtgacggccgggcagttgttgtacgaagtgctggacggtgctatcgattgggcgcagggcgaccgtgaagccggctgggcgcatatcaccgatgtcattgaaaacctggcgctgctggcggtcggtgcgaccgtcagccatctcaccctttcgccctttatcgaacagctcaaagccgtgccattgcctggcggcaaggtgcggctgtggaaaccggacctgtcggcctatgaacatacgttgcggttgccacaaggctcggtcgcggatgggcgcgggctccatcgggtcggcggcaaacaggtgctggaactggaaggcaagcgctatgccgtgcaacaggatgccgagaccgagggctactacatggagcatccaacgcgcagcgacgtctacaagccccggctgaccgccaatggcagtggggcctggaatcatgaactggaacagccgttgcgctggcgcggggcaaccctgatgcggcgcctggggccggtgatggacggcttcagcgacgccgagctggagcagatccgtcgggtcagcggggttgaggaagacaggctgcgtcgtgtgcatgccgagggcgagcccgtgccggcgatcctgctggacacggtgcgccagttccgggcctatcacgatgcggtggcggtggccgaggggatcggccagggcaagctctccagtgccctgtgcagcttcccggccttactggtcactgagttgagcggatggccggagcatctggcgctggaagcctattcggacattgaaccgcgcagcgtgtcggccaagtacggtaattcaaaagccattgcgcgggacacgctgcgtctcagccgcatggcgttgatgaggggggagttgcctgcggcggtcatcggctttttgagcgaagcacaaacccacgcgttactgcccggctacaccccaaggaccccggaactacgcattggcgccttgcgcaaacgcctgaaggactttgcggtgaaccagcgcgcccggttgatgcgcagcctatacgccgagcagcagcccactgcgcagcccgccacccaattgattacacgccagtttccacgcgtgccggcgctgatggccgaggagctattggtcggcgctacgccgcaggaattgcgcaccctcaacactgaccagcgcgtgccgttgcgcattgccgaggccgcacgccaggcgcagcagcaaatgcgcctggcccacgcctatgaagggctatacctggaagcgctggcggacaaggataccgaggtcctggcgctcaacacgcttcagtccctgccggggtggaaggacgacctgcgcctggaggtgcgcgacgccgagctggaaggggagttgcgggccagcttcggcgccgaagacgcctctgagcgcaaggtgctggtgcgggtcggcgagggccgctatcaggcgcgcaatattcgtgatgaaaccctgcacgaaaccgaagacctgtatgcggccctgcaacatgccctgaccgatgcgcaccgtcgggccatcggcttgccgagcatcaaacaaggtccacaactgaaggcaaaaatcgttgaaggcgcgctgccacgggatcaactgcggccattgctcaagatgcagcaacgccgctaccgctttgccgaccgcccctcgatgcgcctgcccggcggacggctggggtatcgatggagcaatcatggccaggacactgcctgggggcgcatcgtcgaggagcgcgtgcgcagcctctaccccacgttgaccagcgaacaggtgagcgcgtttgtcgatgggttgggcgtggagccgcacgcgaagctcaaggccctggagctggaatacaaaaccttcgacaacgcgttgcagaactggctgcgcgagcacgtccggcaagtgtccgcagaggctcgccgctctggcgcgttcctgcaccagcggcgcgcgcgcctgaggatcgtcagggccttgcgcgaagcatggcgtcgcaccggaagcgaggacctggatatcagcgggtattcccatggccaggtcattgacctgtctggagaggacctgttcgaccaattggaagaactgcccctgctgaccgtcaacttcgatcacgtctcggcccttgaactctcgggcgccggcatcgagaccgatcccaccccgttcctgcgtcatttcaagcgcctgcgtcgtctcggcctggagaacaacgagctgacggtgctgcctgaggcaatcgggcagatgttgcgtttgactgcgttggacttgtccgaaaaccagatcgtcctggacaccgacgctgtcaatcgcctgaaaggtctgacgcaactgaactacctgggactggagagtaacccgcttcacctggcccccgacatcggccgcatgccggacttgagcatgctgctgctcggcgataccgggctcggcacttggccgcctggcctgttcgatcagcctcgtgcacgttcttttgtactggacctgagtgccaatcggctggacagcgtgccgcaggtcgaaccggggtcaagccaggcgaataccgtggcgcgtacgcggatcaacgcggaaccacggtacatctccgcacagaacctggacgtgatcaggggctatcggcaatcggtagggctggagcctgatcgaccctatccgcccaggggtgtgcttgacagcattcattggcgcacgggcttgagcgatgagcagtgggtcgccaagcagcacctgtgggacagccttgagcacgagcacgggtccgagcctttttttagcgagttgcgcaaactgtccgagtccgcagacacccttgaggaggacgccgccaaagccgacctgacgcgcaaagtgtggaccatgatcgagtctgcagctgcgcaccgggctctgcgtgacaagctgttcattatggccgcggcgcccaccacctgtgtggatgccggcgcgcaactgttcaatgccatgggcattgaagtgctggtggcccaagcctacgaactggtggccgaggacctggtggaacgccaattgctggagctggcgcgcggcaagtcgcgcttggacgagttgggccggatcgcccgcggcagggttagtgaactggtggctcaggggcgcaaattccccgagtacgatgccgaggggctgcgcgtcacgcatcgtgatgcgcaaggcaacgtgatgcgggacatcgacgaggtggagatctacctgatttacgccaccgagttggcttccgaggacaaactggacttgccttggcaatcggcgcgcatgatgttcgaggagccggatgtgacccctgccatgatcgagcaggcacgcgtgcgagtactggccctggaagagggcgacctgttgcgcaagtcgattggtgagcagccgttttggctgggctttctcaagcagtccaatcccgggccgttccaggcgctgcaggccgaggccgaggcggcgttcgatcggtacgccacctcggacccggcacggttcgaggctgaaatggcgaacctggcgacgcaagacaaggccctggtcgccaagctgaccggccaggccctggaccgtgcgcggttgtcgcgtatcggcgtgccgctcgtgggctagaacaggaaatagcgctgcgccatcggcagcacatccgccggttcgcaccacagcaacacgccgtcggccttgacctggtaggtctgtgggtcgacctcgatgtggggcaggtagtcgttgtggatcaggtcggttttctgcacgtcgcgacagcccttgaccacggcaatctgctttttcaaacccagggcttcgggtacgccggcgtcctgcgcggcctggctgataaaggtcaggctggtggcatgcaggctgctgccgaagctggcgaacatcgggcggtagtgcaccggttgcggtgttgggatcgacgcgttggcgtcgcccatcaggctggcggcaattgccccgcccttgaggatcagcgtcggcttgaccccgaagaacgccgggcgccacagcaccaggtcggcccatttgccaacctcgatggagccgacgatatggctgacgccgtgggtgatcgccgggttgatggtgtatttggcgatgtagcgtttgacgcggaagttgtcgttgcccgcaccatcgccaggcagggcgccgcgctgttttttcatcttgtcggcggtctgccaggtgcgcgtgatcacctcgccgacgcggcccatggcctggctgtcggagctgatcatggagaacgcacccaggtcatgcaggatgtcttcggcggcgatggtttcacggcggatgcggctttcggcgaacgccacgtcttcggcgatgctcgggtccaggtgatggcagaccatcaacatgtccaggtgttcgtcgatggtattgcgggtgaacggtcgcgttgggttggtggaactgggcagcacgttggcaaaaccacaggccttgatgatgtccggcgcatggccgccaccggcgccttcggtgtggtaagtgtgaatggtgcggcccttgaacgctgcaagggtggcctcgacgaagccggattcgttgagggtgtcgctgtggatcgccacctgcacgtcgtactcgtcggccacgctcaggcagttgtcgatactggcgggggtagtgccccagtcttcgtgcaacttcaagccgatggcgccggccttgacctgctcgatcaagggttccggcaggctggcgttgcccttgccggtgaagccgatgttcatcgggaacgaatcgctggcttgcagcatgcgcgccagatgccacgggcctgaggtgcaggtggtggcgttggtgccggtggccggtcccgtgccgccgccgatcatgctggtgacgccgctgttcagcgcctcttcgatttgctgcgggcaaatgaagtgaatatgcgtgtcgatgccaccggcggtgaggatcatgccttcaccggcgatcacttcggtgctggcgccaatggccatggtcacgccgggctggatatccgggttgccggccttgccgatggcgtggatgcggccgttcttcaagccgacgtcggccttgacgatgccccagtggtcgatgatcagggcgttggtgatcagcgtgtcgaccacttcatgggcgagcaactggctctggccctggccatcgcggatgaccttgccgccaccgaatttcacttcttcgccgtagacggtgaagtcctgttcgacttcgatgaacagctcggtgtcggccaggcggaccttgtcaccgacggtggggccgtacatgtcggcgtaggcttggcggctgattttcatgtggttgccctgaagatatgtgttgaatgtgagatcgctatcgggggcaagccccctcccaccttgatgtgtgaacgcggtcaaaatgtgggagggggcttgcccccgataaggccctaaagatcacccatgatccgacctgcaaacccgaatacccgcctgccaccactcaaatccaccaactcgacctcgcgactctgccccggctcgaaccgcaccgccgtacccgccggaatattcaggcgcatgccacggctcgccgcacgatcgaatgtcagcgcgtcattggtctcgaaaaaatggtaatgcgagcccacctgaatcggtcggtcgccactgttggccacgctgagagtgacggtgcgccggccgacgttgagttcgatgtcgccaggctggatccggtattcgccaggaatcatgcaggttgccccagtgtcttgaagtagatggcggtcgggctgtagcgcccgtccgggctttggcagtagtcgggcagttcgccgatcttggtgtagcgcagcgactggtagaaggcttcggccggggagccggcttcggtgtccaggtacagcaggccgcgcttgtgctggcgtgcggcgagctccagggtgtgcatcagttgctggcccaacccatggcgccgtgcattgctgtgtaccagcagcttttgcacttcggcgcggttgaggccgttggctttctggcacagcgccaattgcacactggcgatcacctgctcgtcgcgcaccaccacccacagcagcaggctggcgtcttcgatgctcgcctgcactgtgcccagataagcccgcgcctgggcctcatcgaagtccgccatgaagccgaccgaagcgccatgcctgaccgcgtccagcaacagctcgatcaagcccaggcggtaatgggcaaaactttcagcattgactcgacgcagctgcgcggcgttcatcgatctcactccttgggcggttcggcgcccgggttcaaggccagttgcatgaaggtcaggtccagccagcggccgaacttgatacccacctgcggcatttgcccggtggtgacgaagcccaggcgctcatgcaggtggaccgaggcctggttgccgctttcgatggcggcgaccatcacgtgtttgccgcactcacgcgcacgttcgatcaacgcttgcatcagccgtgggccgaggcctttgccgcgctggtcgttacgcacgtacaccgagtgctcgacgctgtagcggaaaccttcgaagggacgccagtcgccgaacgatgcatacccggtgacttcatcgttttccaccgagaccaggatcggataaccctgggcatgccgcgcactgaaccaggcctggcggttgcccaggtccaccggttgttcgttccagatcgccgtggtgttcagcaccgcatcgttgtagatgtcgcggatcgccggcaggtcgttttgggttgcatcacgaatcatgaccaggcctcacgcgatgggttggtgaacggtgaccagtttggtgccgtcgggaaaagtggcttccacctggatgtccgggatcatttccgggatgccttccatcacctgttcgcggctgagcagggtggtgccgtaatgtatcaggtcggccacggtgcggccgtcacgggcgccttccatcagtgcggcggagatataggcgatggtttccgggtagttgagcttcaccccgcgcgccagccggcgttcggccaccaggcctgcggtgaagatcagcagtttgtctttttcccgtggggtcaggtccatggttcaggtgctccagattcgtggtgaaacggcttcccggcccagcaccgccgggcgcaacaggcgccataaatcgatcagccatgcgcgcgccagcagcgcttcactggccaggcagcgggcgaccagcaagcccggcaattgggtcaggtcgccgcgcacggcgtggggcagggcgcggcaggtttccagcagttcgggttcgatatcgccggtgagcagcaacgtcgcgaacactggctggccgtccagcccgatgggcgactccagcaagccgtcggcgcccacaatgcgctggcgttcatgccagagcaactggccgtcgcggcggatatccagctgtgattgaaaatgccccagagcaaagcgttcaccgctggccggtcgacccagggcaaccacgtcccagtaaaacagacgggcatcgccctgcaggtcgatgcgcgtggtgagttcggcctgggccgcgctgaacacgatggtttcctggggcagccactccagcgtggcaccggcctcaacgctcaattcgagttgctggaacgcagggcctttggcgcgataccacttggcggcaccggggctggtcagttgggcccaggccccttcggcgacatgggcacggatatccaggcggtcaccaccggcaatcccgccgggcgggtgcacgatgatgtgctggcacacctcggggccttcggcgtacaggtgcttttgcacccgcagcgggccctggtggcggcgcattgtcgggcgcgtggtatcaccgaagcgcgcatagccgagttccagctcggcatgccagctgggggtgaacagtgcggtggaggcgggcaggttcatggtgagtgcttgaggtcttttttaaacagcttttccctaggtgtagcaaaggacgtgccggggtgaaacacggattagaggtcggtcctgatggaggcgtgcactgttgtggtgctgtgccgtcttgagcgatttattcaatgcgctgttgtggtgcgctcggccagatatagttaggccccttcagggagggcgggagcgttagatgggcgtttcttcctcgacccttcccgaaggtgctgcacgatggacatccatgacatgccacaacccgatggtgttcggcaaaaccccgtctcagatgggcaactgcctgccctcagcccaccctttatcagcgccgatgatgcggcgtattgggcccatacccaaataggcagcaagcgcgaacgcgagtacggcggtgcgattctcaagcacgcaggccagtatttcgcgacagtgcccaagcagggtgcgaccaagcaaatagcgctcgatagcgtgatcccgatcaaggatggcaagccgatcttgccggcggattacacctgctccgggttttaccactcccatcctgataccgatgatgactttccctcaaggatgttcccggccaggcagcgttcaattctgcgcggcttgttttcttaccccgacatgcaggtcatttttcgcttgagcggtcatgtaccggcgcattatctgtcggggccagatggcactttgttgaaatttgtcgtgcgaacccaggcaaagttgcaggcgtttctgacccggctggaccccgccatccaccctgagatcgactttttcacggactatgtgccggaggtggccgaggccggcgcactgtgggtactggtgcccaacgctgcctggggcggtgtgcgcgggcgggtcagcaaggactgggtgctcaaggagtgggtgaagaacacgcccttgaagggcggcgagcggatgcaaccgttctcttccgctgtctttgcattctcacaactgtcagcgctgattgcctttacggacgaggcgtttgaccagccactctgggggtatctgctcaaggccgcaggccgcgatgaatacgtctatgtgcctggcgagggtaccttggatgaatgggggccgccgcacaccctattcccgcgtgacgccaacggtcagacgcaactgccgccaggctttctgatcgagggcgtcttgatgcacctggtcgataaaaccaggccaccttttttacccgcgcacctggcgagcctgatcgaggtgttggcggacgctcccgctctctttgaccccctgcgcccgccgaccctgtcgcagcggctccccgatggcggcttgaacagttacaggctctcgggcacggatgccgagtcgtcgttgctgggcaagggcggggcgatcgcacaacggcagatcgagaccggcgcgctcacggtgttccgttaccttgaccggttggctagcatgggcgagatggcggtcttgaaggcgggggtgatttggccacgcattggaaaaatacagccgtggtttgaagagttacggccccacttcagcccggattttctcaggcccaatgacgctgcccgctacctctgtgagcaagtattgcggcgtgatatctctcattttggctacatcctgcagcgcaatgacggtaagttcgtggcaaccggactgatcgccgatatcaaccggctggtgggtatggggatgtcgaaaggtagcgttctcgacgtcctgacgttgccggcagattatcgctattacggttttttcgttgccgttggcagcaacccggaagaactgaaacggatgctggcctcccatccggacgttgaaggaaggcgctcgctggatgagcgtctgctgttgacgctgacgattccctatcggaattatgtcgccagcctgacggcggatggtcagcccattccttgcctttactattcgggtacggcgggttcactggtcaagtatgtgagcagcggcagcccacaagagcgcgagtttcatacggcgctgacagcgatcatcgacaccggtatcttcaagccccgcatggatggtttccgtggcacgcccctgcaagtcgtcagcaagatggcaagcctgggtgagttccatgtcatcgagacgaacgcggtcttcggcaactcccgtggcaggctgcctgtgacatggaacgcatttgagtcgtttgtctccgtgtctcctgtcgaaccgccgtacaactggatcgtacctttcccggaactggccgctgaagtggcgcacgggcagttcggcctcaagccgcagctgcgacaagtcgcgtttattttgaaagctaccggagcccaagcgtacttctcgacgcagcctgcgcccatcggcagccggatgttttcaccgtcatcggtttttacccaggatgccaacggtgatccgctgatacccgaggggtatgaggtccacggaatttgctaccagtcgctgcccggtactgggatgaaaacccttcaacactggttgtacgaaagctttgtcgcgccccaggacctggcggctgcaatcgcccaggcccgagagtcgaaccgtacgctgcgtgcgctctacttgagcacgcgtgacggtgcgcaattgcaataccgcttcagcgggacggggttggagagccagttgtatggcgtcacacctaccggggaggtcaacgataatggccatcaggcgagtttgcgctccggagccgtgacgcctacggagtatgtactgcgggtggcggcggcgggcgagttgtcggtgttggtggccggcaagctgtgggacatccagggccgcgtggaaccaacctggcggccctttgcgcgctaccgcatgccggagttcagtgcgccgtttctgcaggccgatgatgccgcacggtttgcccatgaacaggtgggtgccgatcgttatgctgaatactgcggttgcatcctcaagacacccgaccagcgttttgtcgccacgctgccggtggcctgtctggaggcgcagcggtttgccatcggcacggtgtttccggcggaccacaacggtgtgttgctggtccccgagccctacgtgctctacgggcaatacgcgtcatgccggtcggttacccggctggacaagacccgcatgcagcgcaacggctggtcacgggaggaggccagtgtcgattggcaactgttcagcgatgccgatctgcgcaacctcatcggcaaccggcactgggtctccaccggctacctctcctgcgatgaggacggcctgattgcctttgaccttacgggcgccaaggcccaattggatgaattgaacccggacacctcctcggcgccccgcgaaccgcaggcccgggtgcggcacttgtcggccagcggcttgcgcattgtgctcggcagtccgttgtggggattgcctggcagtgtctcgccaacctggcgtgcctatgcgccggcggcaacctttgaaaaaccgcagcaggtggcgtttggcgcagtgttttccactgccagggaagcggttgcagacgctcacaagcgattgcgccggggctattacgcggcccagacgggttttgcttttttgctcaagcacgcgcaaaaggaccagtacgtgctgagccagcttgtccctgcggatggcgccaatccgttgttcaacctggcgagtctgtttggtaaccgcgatgacggtgcgttcatttttccccaggcatttgaattgcacgggttgtattacgcgcgcctgtggatgcccgacaacctgcagaatccgcagcgttggctggctcggcacttcctgtcttcggccgacctgtacagcgccttcctgtccgcccggcgttggcgtgatacgggtagcagcgtgaccttacccgtgtttatttcaaccctggacaacgccgtgctcgagtaccagacggctgtctcgacgccgttgttcgacccggaaaaacaggcgtccggcacctttgaagacgtgcatacccaactgagcggaggccagctatcaccccaggcatttgttagaaaagtcatcggcacgagctggctcggtgtgctggtgcccagtgaatgctgggacgaggagagcagcaggctgggcgccgactggctgccttatgccgacttcagtcgcagggcgttgagcccggcgttctttcaccaggcggatgcgctgcgctacgcccaccagcgcctgggcaatcgccgcgacagggtgtacggcggcttgctgctcaagcgcgtcgacggcctgtttgtcgccaccgagccgctgcccgtcgcgacagagaacttcgatcccaaatggatcctgccggatgaagacgtgcgtgcggactggttggcgccgggcatgacgctggtggcgcgctaccgttcgcggcgggacgtactgcccagcttggtgctggacgaggacggcgaggcggtctatcgagcgatgttgtccaccgatgtgctgggcacggcgctcacgtgccagcacctgtggagccatgagtacctgttcgggctggatggctcggtgatcggtttcagttgcaaaagcgcaacggacgcgacccagcaaggcccgctttccaacgaccttgaagcgctccggcaagcgctggcaccggctgagcaaacgcctcacgacccgctgagcaacgcgctcgagaagcagatgcgcgacggtagcctcacgcctgtggcgttcgtcaatcggctgctcaaggtcgcctcgatgaccgtggtgcaaggcagtgcgctatggggcaatgctcaggtgctgggcagcggatggctgcctgcgcgtggttttaccgcgcctgaccggttcatccatgccacggccgatcgcgccttggggccggtgttcagtcatatcgatgacgccgcgcgcaacgcccatgaaagcgccggagagcgagaccggctgacctacggttttatcttcaagttggccaatggtcactggatggccagcctaccggtggacggtgaagaccgacgtttcccctacgacagggtgttgctgggcgggcgtttgccggtgggctgtacggtggcggcgctctatctgtgcgccccggctcgtcagccgcaagagttgcgcgcatcagcggtctatcacgccttcatcccgccgagtctgttgcgtgcagcgttggcggtggtgcgtacgaaaacaaatgccggggctgcgccttatctgccgttgtacctgtcctgcgccgacagcgccctgctcaaataccgtgcctcacgcctggacagtaactgggacgaagagtcgcagttgcaggcctatatccgcacgttgaatgggcacttcaaccctcacgactacattcgccaggtcgctcgtgccgggcagctcgaggtgctggtgacgggggcgatctgggccggccaagggccggtgtcacagtcctggcgtgaacgtgcgccagctgcggtcgccgcagacccggatgcgcgggtggtgctcgggccgctgttttctcatccggatgatgccgcgcggtatatgtggcgccgctcaccggctgttccaggcaaggcgagcatgggggctgtcctgaaaaatgcagcgggcaacagctatctcgccagtgagccggtggacgacagcgggccgagtgtccacgtggggctacgtatgaatacgagtgcttatcgacgcctgttcggctgggtgatgaacctggatgaacgcactcaaccgcgtcccaaataccctgcgggttaccgcgtcatgggcgtacagcaactgcacaagtgggaggccaatccggagcggctggctgaccgacatgaacaagctatcgccgaaaactttatctcgcagaaggagttcaggtttgtggtcgacatgttaaggcaggataaagtggctggcgcccgctactacttcactcccagaaatggcgccctgttggtctacgcgcccagtttcgagcgcgtcgagcacgacctgctgctgtctggctggatcgaccccgaatcggacaaaccccggctcaagaccagcgaagccctcacggtcttgttcaattccggtcggttgcatgtgttggagcccgaccgtttctggcaacccaaggggcatgtcgcatcgcgttttctgatggagttgcgcaaagcgcagcagactcgactcagatcgtgacgaggccacgcacaccctcgctttccatgtgctcgccacggccctgctgcacgatttcgccccgggacatcaccaggtactggtcggccagttcggcggcgaaatcgtagaactgctccaccagcaggatcgccatgtcgccgcgtgcggcgagcttctggatcaccgcgccgatttccttgatcaccgagggctggatgccttcggtgggctcgtcgaggatcagcaggcgcgggcggctggccaaggcccggccgatggcaagttgttgctgctggccgccggacaggtcgccgccgcgtcggtgtttcatttgcagcaacaccgggaacaactcgtagatgaaggccgggacttccttggcctccttcgcgccaaagcgtgacagccccatcaacaggttttcttccacggtcagccggccgaagatttctcggccctggggcacgtacgcgatgccggcatgcacccgctggtgcggcttgaacgcggtgatggcctggccttcccaggtcaccgcgccttccttggccggcaacaggcccatcaggcacttgagcaaggtggtcttgcccacgccattgcgcccgagcaggcaggtgacttcgccgatcttcacgtcaaaggacagcccgcgcaggatgtggctaccgccgtagtattggtgcagcttgtcgacttgcagcattctcaaacctccttagatcccacataaagcaagccagtgtcctggtcagcgaccgaggtaaacctcgatcacccgctcgttttcctgcacctgctccagcgacccttcggccagcacgctgccctggtgcagcacggtcacgtggtcggcaatcgagccgacaaaccccatgtcgtgctccaccaccatcagcgaatgcttgcccgccaggcgcttgaacagttcggcggtgaactcggtctcggcgtcggtcatccccgccaccggttcgtccagcagcaacaattgcgggtcctgcatcagcagcatgccgatttccaggaactgcttctggccgtgggacagcaacccggcctggcgcggtgcggaggcggtcaggcggatggtgtcgagcacttcatcgatacggtctttctgttcgccactcaggcgtgcgcgcaggctggcccacaccgatttgtcggtcttctgcgccagttccaggttttcgaacacgctgagggcttcgaacaccgtgggcttctggaacttgcggccgatgccggcctgggcgatctgcacttcgctcatgccggtcaggtcgaggttttcgccaaaccaggcggtgccgtggctggggcgggtcttgccggtgatcacgtccatcagcgtggtcttgcccgcgccgttggggccgatgatgcagcgcagttcgccgacgccgatgtacaggttcaggtcgttgagggccttgaagccatcaaagctcacgctgatgtcttccagggtcaggatggtaccgtggcgggtgttcaggcccttgccggccgcctggccaaggccgatggcatcgcggccgctgcccgcatcgaaaatgggttccagcatgacgttcctcatttcttcaacaggccgataacgcccttgggcaggtacagggtgacgaggatgaacagcgccccgaggaagaacagccagtattccgggaaggccacggtgaaccagctcttcatgccgttgaccacgccggcgccgagcaacgggccgatcagcgtgccgcgcccgcccagggccacccacacggcggcttcgatggagttggtcggcgacatttcgctggggttgataatgcccacctgcggcacatacaacgccccggccaaaccacacaacaccgcgctcaacacccacacgaacagcttgaaaccacgcgggtcgtagccacagaacatcaggcggttctcggcgtcgcgcagcgcagtcagtacccggccgaacttgctctgcgccaggcgccagccgatgtacaggcttgccaccagcaaggcgacggtggcgacaaacagcaccgcccgcgtgcccggctcggtaatgccaaacccgaggatgctgcggaagttggtgaagccgttgttgccgccaaagccggtctcgttgcggaagaacagcagcatgccggcaaacgtcagggcctgggtcatgatcgagaaatacacgcccttgatccgcgaacggaaggcgaagaagccgaacaccagcgccagcaaccccggcgcgagcaccaccaggcacaaggcccagaggaaatgctcagtgcccacccagtaccacggcagttcggtccacgacaggaaggtcatgaacgccggtaactcatcgccggaggcctggcgcatcaggtacatgcccatggcataaccgcccagcgcaaagaacaggccgtggcccagggacaacatgcccgcgtagccccacaccaggtcgagggcgagggcgacgatggcgtagcagaggatcttgccgaccagggtcaaggtgtaggccgagatgtgaaagagattgtccggcggcaacagtgacagcaacggcagcgcgagcagtaccgcgaggatcaccacgccgagggcaatcgtcagcttggggccggccttttgcgtggccgtgagcatcaatggctggttcatcagtcgatcacccgtcctttcagtgcgaagagtccctgcgggcgtttctggataaacagaatgatcagcgcgaggatcaggatcttgccgagcacggcaccgatctgcggttccaggattttattggcgatgcccaggccgaacgccgccgtgacgctgccggccaactggccgacaccgccgagcaccaccaccaggaacgagtcgatgatgtagctctggcccaggtccgggccgacgttgccgatctggctcaaggcgacgccgcccaggcctgcaatgcccgagcccaggccaaacgcgagcatgtccacgcgcccggtgggtacgccgcagcaggcggccatgttgcggttctgggtcacggcgcgcacgttgagacccaggcgggtcttgttcagcagcagccaggtcagcagcaccacgcacagcgcgaaggcgatgatcacgatgcggttgtacggcagcaccaggttaggcagcacctggatcccgccggacagccacgccgggttggacacctcgacgttctgcgcgccgaacaccaggcgcaccagctggatcagcatcaggctgatgccccaggtggccagcagggtttccagggggcggccgtagaggtgacggatcaccgtgcgctccagggccatgccgatggcggcggtgacgaaaaacgccaccggcagcgcgaccagcgggtaaaactcgatggccgccggtacgtagcgctgcatcagcagttgcaccacgtaggtggagtaggcaccgagcatcagcatctcgccgtgggccatgttgatcacgccgagcagaccgaaggtgatcgccaggcccagggccgcgagcaacaggatcgaacccagggacatgccgctgaaggcttgcccgagcagctcgccgatcatcagtttgcgcttgacctgggccaggctggtttcggcggcggtgtgcacggcggcatcgctttcgacgcccggtgcaagcagggcttccaggcgcgtacgggccagcgggtcgccggtattgcccagcaaacgcacggcattcaggcgaatggccgggtcggtgtcgaccagttgcaggttggccagggccaggctgagggcgctgtgaacttgctcattggtttcggtggcgacctgttggtcgaggaatttcaactgcgcgggttgtgcgcttttctgcaaggtcttcgcggccgccagacgcaccttggggtcggcggcgagcagttgctggctggcctgcacgttatcgatcagaccgcgcaggcggttgttcaggcgcacggttttggtctcaccgttgacggtgagttgaccttgttgcagggcgtccaccaactcgatgcgcgccgggtcaggctgggcggcccagtcctggagcagcttggcttgttgcgtcgggttggcggccaggaagtcttcggcgtcgctggcgtgtgcggccaaaggcagcaacagcagggccgtgaggatgaaacggtacagggcagtaggcataacaaaatgtcctgatcatgcgcggacaagcttgatgtgggagggggcttgcccccgatggcggtgggtcagtcagcccatgcagagcctgacactcagctatcgggggcaagtcccctcccacatttttatctgcgcttggggcttagttacttttcaccgcatagtccggcttcttgtcattgccaggaatgtacgggctccacggttgtgcgcggatcggttcctgggtctgccacaccaccgagaactgcccatcggcctggatctcgccgatcatcaccggcttgtgcaggtggtggttggtcttgtccatggtcagagtgaagcccgacggcgcggcgaaggtctggccggccagggcttcgcgtactttgtcgacatcggtggacttggctttctcggccgcctgcgcccacatgtggatgcccacgtaggtggcttccatcgggtcgttggtcacggctttgtccgcgcccggcaggttgtgttgcttggcgtaggctttccagtcggcgacgaacttcttgttcaccgggttctccaccgactggaagtagttccaggccgcgaggttgcccaccagtggcttggtgtcgatgccgcgcaattcttcttcgcccacggagaacgccaccaccggtacatcggtagccttcaagccctggttggccagctctttgtagaacggcacgttggagtcgccgttcacggtggagatcaccgcggttttgccgccggcggagaacttcttgatgttggcaacgatggtctggtagtcgctgtgcccgaacggcgtgtagacctcttcgatgtctttatccgcgacgcccttggaatgcaggaacgagcgcaggatcttgttggtggtgcgcgggtacacgtagtcggtgccgagcaggaagaaacgcttggccgcgccgccttcttcgctcatcaggtactccaccgccgggatcgcctgctggttgggcgccgcaccggtgtagaacacgttcggcgacatctcttcgccttcgtattgcaccgggtagaacagcaggccgttgagttcttcgaacaccggcaacaccgatttgcgcgacaccgaggtccagcagccgaacaccacggcgaccttgtcctgggtcagcaactggcggcctttctcggcgaacagcggccagttggacgccgggtcgaccaccaccggttcgagcatcttgccgttcacgccgcccttggcgttgatctcgtcgatggtcatcagcgccatgtccttgagggacgtttcggaaatggccatggtcccggacagcgagtgcaggatgccgaccttgatggtctcggcggcctggagggtccagctcatgcccatggcggcaatggatgccgacagtgtgaaagccttgatcaagctgcgacgcttcatggtgcgatctccgtgtacccaagtgttgttgttggacagatgcaagggcgattgcaaaggctgtgcccgctttgacgggagtgctgtccagggctgtatccgggcggggggctacgcaggccgcactgaaacggcgccgtagcagctgggtggtgcggggcgggcattgttttggtgcgcggcgccgcttaactatttagcgcccggcgaatggggcgcgggaggatggtgggcacttcgattctgccaggagctgttcacatggacgaccaacccacgcgcccgcaacgcgctgcacttgcacggggccacgccaaactgagcaggctgaccccggcgttcatcagcaccgacgatctggtgcgctaccttcatgaacgcatggccccacggttgcagctggaacatgccagcgtgctgctgcaacgcttgtccgacggcctgtatctggccaatgaaccgattcccgaccggcccacggtgttcaactggaacctgctgctggatgtcgatccggtcagccaggactttatggaccctgaaggttttcgaattgtcggtggctggcatgcacacacgaacatgaccgattgggtcaaacgagaaaacccctcgtggacggcagatgaagtcaccgcgttccaggggttttattccgagccggacatcatcatcattttccaggaccgccatcaattcaaggtcgtctacctgtccggccccgatggcacactgcttaagttcgaacccgatgattccacctccggcgcggactacgcccgttggctacgcaaccgtggcggctttgattcgccccatgcccacagcggcaccctcgcggggtattaccagaagctggcgtcgctcgggcgcttgaccttcctggcatctattcccgcctggggcggttcggtgggcgcggtgcccgctgattggcaaccacgcaaacccttcaaggctccagcgctggcgttgccttgcagcccggtgttcatggacaagcagcaagcgctctcccatgcgtggtcgcgcatccagcgcaggccaaacgccaggcagcacgtattgatcctgcagcgtgatgggcatgagcattacctggctggggagccagaacgggaggcctctgtcggcgggcaactgcctttactgcccgcaggttgccacctgcacggcatctactttcactcccgacccttgccgggcctgtaccccgatcaggaagcctggctgttcaagcatttcgtcagccccctggagttggcgcagcgcatcgcgcaatttcgccagtacagccgtggtgtgcagtccaccctcggcgcatcactgtatatccgtgtgcgcgatgaagcgatcttgcgttatcgcttctccggctcagccgccgaatcccggttgttcacccaggccgccgacggcacggtagaggccgatgagctccagtccaaactgcactcgggcgtgttgctgacccgcgattttgtccggcaagtggccagggccggtgagttgacggtggagaaaaccagcgcgttgtgggaccgcagcggtgcggtggacgacacgtggacgccttattcgcaggttgtcttgccggcattgagcgcggcatttctcaccgccgacgacgcggcgctccatgcccaccggcgtatcggcaggcgccgcgagcaggggctcggcgggctgatcctcaagcgcggcgatggtcgcttcgtggtgaccgagccgctgccagccgggccacgcccatttgccttcgccggtgggtacccggtggaccggcagaaacagccgatcattctgcatcccgaccaccatttgcatgggcgctacgcttcgcgcacggcgctgtcgctgaccgacccggcccaggcggtcgagcgcaaatggacccgccaggacaccgagctgaatgcgcagatgttcctggcagacgacgttgccgatctgttggcaaccgggcaagtcggctacctgtcgggtaccgaggactgcctgctggccctggccccttcgaccaccactctggcgtggcgcaagcaatggtccagcgagacggcgggcatgcgcagtgcaatcaaccagcgcctggaagagggcaaggtcaagcctgccgatgttgtacggaccctggccgaagcgggaacgctgcgtattgtgctcggcaatgcgttgtggggcccagccggtttcgtcgaggtggactggggcccttgggtgcgggcgctgacgttccagcgccccgcgaccgtcagccacgggccgatcttcgaaagcgccgatgcggccgcgcgcgaacgacaccgacacgccgcccattactacggtgacgatcatgtcagccgttattttgcgttcgtcctcaagcatcgccagcgcgaagaatatgtcgccagcgagttggtcccggtaacccgccagtcggcgctgctgtccttcacccggttgtacggcggtgcactgcccgagggcttcgactgccacagcctgtactacaacaaaccctgggtcggcaacggcacccgtggctggctgcaacggtttttcatcgaaccggaagacttgagcgaggcgctgtttcaggctcgcgtcaatgcgttgttgtcgcccctcggtgcgccggtgtacatcgcggtgccggacggtgcgctgctgcgttatcagtcgccgtccacccaaggcctgttcgaaaccaacagcatcggggacagcgcggcgacggtgcgcgccaagctcaatgtcggcaccctgacgccgttgcagtttgtgcgcaatgttgcgatttccggtcgcctggaggtcgtccaggccagcccctgctgggaccgcgaaggcacggtcacggggctgtggacgccctacgcgcagttgctgcggcggcgcctgagcccggcgtttgtgtcgatggacgatgccgcgctgtacgtgcgtcgccgtgtgccgacgagcatcgaacacccctacggcgggctgatcctgcggcgcgaagacggctggtttttcgccaccgaacctttgcgggtccccgatgacagcttcgacctgaaatggatcttccccgacgaattggcctcccgtggcgagcatccgccgcgcactgtgccggtggccagttactacgcaaggccggcggaacagtggccgttcatgctgtcgcccacgcagtcgcaggtgtacggcaacctgttttccacccgtgcgctggcgcaggtgttcctgaccgagcgggcgcgcatgcatcactactggctggccgccgatggcgcgttgcttcgtttgaacacgcgtcccgaggaaaaagcgccgcttgtgaccatcgccgacctggtgacacgcccgcgcaatccccatgactggctcaacggtcggctcgaacgcatgctgcgcgagggcgagttgacgcccaccgcgtacgtcaaccgcattgcccagaccttcgccttgcacgtggtcagaggcagcgcgctgtggggcagcccaggcccggtacgcggctggcaaccctttgcgcctgtgccgccggccaacggtgcctatgtgcaggcgttccacgatccggcgtgcagcccggtgcatgtgcaggccgatgacgctgtgcgctacgcccatgaactcgcgggggcgcgtggcgaattgcagttcggctatgtgctggaatcgatcagcaacgggcatttcatcgcgaccctgccgatcactgacgccggcgccaacctggcgcatcggcgggtattcagtgatgccggttaccctcatcgctatgccttgggcggcctgtacctgtgtgcaccgcaggtgtccgaggtggtgccgagcgcgcccgcacaggcaggcgacggcgtctatcaagggctgtttttgccgtcccggctgatcgaggcgatgtaccaggtaacgaccacacaggaacgccctgcgttgcctctttacctgtcgtgcgcggatggggctctgctgcggttcgtggtgcgcgaccctcggtttatcgggtatggcgatgatgtgaagctgcgcctgcggctgctcaccccacgtgacttcatccggcgcatggcggcggccggcgagctacggatcctggtgcccagcgagcattggccggggaccggtatcgtcggcgcagactggcagccgggacgctctcgtggggtcgaaccggcgggcgacaactaccgcgcattggggccggtccatgcgcatcaagatgacgcggcggggttcgtccacgctcgcgccgggcgtttcacggggcaacaggcgatcagcgcgttgctggagagcggcggggtgatgggcaagcatgtaccggtgctggagctgccggaccatggtttcccttcggcgacggcagcgcggttatttgtgacggggccgtggcccgcaggcttgcaggtgcgggcggcgcatctgctgttccatgccgggctggatcagccgcagatgggcgtcgagcacttgtatggcgagtacttcgtgagctttcgtgaactggcgtactacattcattcgctcaaacagcagggcctggcgatcaacgggttttacctcaccgcccgggacggtgccttgctcggttatgcgccgcgcttcgaccaggccgagtacaacctgctggcaaccaccggcaaatggagcgccgaaggcggctacacgaggttcgcgccagacccctcacacgtgttggccgaactggcgcgcaccggccggttgcgggtactgcacagtggtgagttctggaccctgcgcggcgcgctgggcatggacctgaagctgcccggcagccccggcgggcgaccgtccagggacgaactctgaggcggtcagcgccggcgcatcaaaccgatgaagaacaatccgccaatcgccgccgtggccacgccgatgggcaggtcttcgggggcgatgagggtgcgtgcggccacgtcgacccacaccaggaacaagctgcccagcagcgcgcacaccggcagcaggcggcgatgctcggcaccgacgagacgtcgggcaatgtgcggcaccatcagcccgacaaaaccgatggagccgctgatggagaccagcacaccggtcatcaatgaggccaccaggaacaccttcagccgcacggtacgggcgttcaggccgagggtcacggcggtctgctcgccggccatcagcgcgttcaacgggcgcgccatgcccagcagcaccagcagccccagcagtaccgtcaacgccggaatcgccagcagctcccagcgcgccaggccgaggccgccgagcatccagaacatcaccgccgaggcggcgcgatggtcacccatgaacagcagcagattggccgccgccatcatcacaaacgacaccgccacaccgcacagcaacaggcgatcgctttccagccggccgttacgactggctacggccaacaccaccagcatgctcgccaatgctccgataaacgcggcgatgggcagggtcagcaggccgatgacttcgcccacatgcagcaccacgattaccgcgcccagggtggcgccggacgtgacgccgagcaggtgcggatcagccaacgggttgcgcgtgaccgcctgcaacactgcgccgatcaacgccagcccggcgcccaccagtgcgccgagcagcatgcgcggcacgcggatcagccacacgatatgttcctgcccggccggccaattcacttcaccgatgccgagcgccttgtacagcaggattcgccacaccacgtccaccggcacccgtgccgggccgaagcccagcgacaggacgcaggagaccagcagcaccgcgccaagcgcggcgagcagcagcccatagcgacgggtgatcattcgccgtggaaccccttggccagggtttccaccgccagcacgttgtcgatacccggcgtggcctgcacgtaagggatcacgataaagcgctggttgcggatcgcatccaccgcttgcagcgccgggttgtcgagcaggaattgctctttctgttcggcagtgacttcgctgtagtcgacgatcacgatcacctgcgggttgcgctccaccacggtctcccagttgacgcgggtccaactggcctcgatgtcatcgagaatgttgcgcccgcccgccgcgtcgatcagcgcctggggcatgcccaggcggccggaggtcatggcgcggtcttcaccgctgtcgtagaggaacacccggggcttgtcggcgggcaggtctttttgtacctcggcgacctgcgcctgcatctgcgcgatcaaggcattggcgcggtcctgcacatcgaagatcttgcccaggttgcgcaggtcgttataggtgtcttccagagtcgcagccgggcgcttcatcacgaaggcacaggattcggtcagctcatacacgttgatgcccaagggttgcagcgtgcttggtgtgaggtcgccgcccacacgcatgccgtagtcccagccggcgaagaagaaatccacgttggcgttgagcagggtttccaccgaagggtacttgctcgccagctccggcaggccgtcgagcagcccggccatttccggggtgaccgacttccagccggtgacgccgctgtaaccggccatgctcggcttgaggccgagggcgagcatcatctgggtcatgttgatgtcgtggctcaccgcgtgtttcggcgcttcctggaaggtcacgtcgcggttgcagctcttgatggtaaccgggtagtgggtcgctgcggcgagtgccccggcggtattgaacagcaaggtaatggcaagcagcgaacgcaggatcatggttgggttatccaggtgattcgggggtagccggacagcgggtgggtatcgatcaacgcctcgacgccaaacacatcgcgcagcagttcgcgggtcagcacctcatggggcgtgccgttggcgacgatgcgcccgtggttgatcacgtacaggcgatcgcagaaggcggcggccaggttgaggtcgtgaatgctcgccagggtaccgatgtgcaggcgcttgaccaagcgcaacagctccagttggtaacgcgggtcgaggtgattggtcggctcgtcgaggatcagcaattgcggctgctgggccagggcccgggccaggatcacacgttgtttttcgccgccggagagagtggcgaaggcgtggtcctcgaagccttgcatgccgacggatgccagcacctgctggatcaactgccggtcgtgcagcgtgtcgccgtcgaacaggcccttgtgcggcgtacggcccatggcgaccacttcatcgacgcgcaggccgaaggcatccgggaactcctgcaacaccacggcgatgcgttgcgcgcaccacttcgaactctgtttccacacgttctgatggtcgagcaacacgtcgccctgcgccggtttgctgaaccggtaggcgcagcgcaacaggctggtcttgccactgccgttaggcccgatcaggccgacgaactctcccgcaccgacctgcaggctggcgtcacgcagctggaaccggtgatggcagtggtcatgccccggcggggtccaggccaggtcggtgagggtgagtgcggtcatcagaaggtgtagtccgccgtgacaaagaacgagcgtggttcaccgaggatccactgctggccgtcgttgtattggctgacggcataggtgcggtcgaacaggttgttcaactgcaggcccagggtggtgttgcgcagggctttccacgatacggtggcatcgaccacggtgtagctgggcaactcgttctggttggccatgtcggcatagcgtgcatccacataacgcacaccggcgccggcgcggacattgtcggtcaccgccttgctcaaccacaggttggcggtgcggcgcggcacgtccaccgggcggttgccgtcgcgggagacttgcacgccgttgacgtcctgtttgaagtcgtcgtattgcgcatgcacgatggccgcgttggcttgcagttgccaggcgtgtggcagttgcaggtcgaggctggcttccaggccacgggaggattgctggccgacttgctgctgcaggctcgggttgcccggcacgtcggtgagcagtttctttttgacgatgtggtaggcggccaacgtccattcaccgcgctggtcccagaaggcttgcttgatgccgatttcagtctgcttggcggtggacaggtcgaactgctgctggccctggctcagggaaatcaggccaccgacgccgtcggtgctggtggcgtactggccgtagaccgaggtgtcgggcgtgatcgcgtagaccaggccggccttccagttattgccggtaagggtcttgtcggactggctgccggtgcgcagttcttcgcggtcgatgtgcgcgtagtcgcggcgcaggccggtgatcagcgacagttggtcggtgagttgcaggcggttttccgcaaagccggcaacggttttggtggtggtggcgaacagcggcttgaacgggtcgttgctggcgaactggcccggggcggggtggttcacgtcgatgggttggccgctggcaaaggtgtcggtaaacggcgagttgctggccaggcggaagcggatacggttgtattccacgccggtcacggtctggctgtcgaggccgaacaggctgtgcttgaaggtgaaggtctggcggtcgccgacctgttcctggttgtgcttgatgccgtagttgccgctgcgggtcagttggccgccggtgaagttgtagttctcggcgttctgccagcgacgctggtttttcaggtaatacagctcgttggtggcgctgacgttgtcgttgatctgccactcgctggtcaggcgcgtccactggtcgttgtagtgctgggtgtcgttgctgacgttgtagttcttgtcgcgcaggcctttgtgcaactggccattgatcagtggtgtgccgaagtagttctgcgggcgctggtcgccgtagtcgctggcgaaggtgaagctcaggttgtctgccgcctgccagcgcagggcaccgctgacgaagtcgctgctggagtcgccacggtcgataaaaccgttgctgcgcaggcgattgaggttcaggcggtagctcagggtgtcggtcagcgagccgccgctgtctagggcttgttgctggcgatcgtaggaaccgtagccgaggcggatgtggttttcgatcgcgccgtcgaagggctttttcggcacggtgttgatcaccgcaccggtggcgccttcgccgtacagcaccgaggccgggccgcgcagtacgtcgacgcgctccaccgaccaggtgtccaccgggaaggtcgaggtgcccatgcccatgtacatgcggttgccgtcatacaactgcatcaccgagccctggccggtaaaaccccgggccgacaacgaggtgccgccgtcgcccggcgtgccggtgcggctgatgccggtggcgcgggaaatcgcgtcctgcacactggcgtcgccgcgttcgcgaatctgcgtaccggtctggctctcgacgctgccgggggtttgcagggccgtgagattcaggcgcgagccggcggtggtcggggtcttgaggtcgacgtgatcatcgtccacggcaggtgcggtgacagggctggcgggcagggtcagggcctgggcgctggtatgcagggcgagcaggcacaggccggacgcgaggtacttgttcatcgggtggaaaatcttcttggcggcagtgctcgccgctgggcgcggcgagctgaggtatgcagtaagtgttataagttaacacttcctacgtcgagggtgaaagcccgcgtaagactacataacgcctctatgtggggcatctcgcctatttcatgtcgaacctgaggcagcttcacgttgtgcgaacagccgcgacagcaccaggcgatccaacacccacaccacgatcaacgacgcacccaccagcgggaaaacgatcgccagcccgagcatgatcaccatcgcggttttccacttcggcaggtcatggcgcagcggcggaacacccagcccgcccaccggccgacgcttccaccagatcaccacgccgctgaccgcgctgagcaggatcatcaggcagatcagcagcacgatcagctggttgacccagccgaacatcttgccctcgtgcagcatcaccccggtctcggtggcgcgcgccaccaggttgtagtgctcccagcgcacatcggcgaggactttgccggtgtactggtccacatgcaaggtggcgtcgttgcgtgggtcgttggcgaacaccgcgatggtgaatacaccttcggcggtggtgggaaaggtgatgctgtagccgggctcgacatggcgcgcgttggccaggtcgaccacttgttgcaggcgcaacgcaggtgcagccggcgcagcgtgcagggcgccgtggttcatgtgctcggcgtggtcgccggacatcggcatcggcgtgttctccatggcccacggcacggtctgttgactggctgtattgaggctgcgcgcctgttggtcggactgcggcacgttgttccacatcgccgctggaaagcgattccacagctcggcgtattgcttgccccagaagccggtccaggtcatgccgctgagcagcatcaccagcaacagcgaggcgccccagaagccggtgaccgcatgcaggtcacgccagagcacccggccacgggcagtgaagcgcggccacaatacgcccgccgatgatttgccacgcggccaccataggtacaggcccgacaccaccagcatcacgccccaaccggcggcgagctccaccaggcggtcgccgaccgtgccaatcatcagctcaccgtgcagggcgcgggcgatggcttgcaggttgtatttggcatcctgttcgccgaggaccgtgccgcggtaggggtcgacaaagaccgtcacttcgcgcgcgttgttatgcatcacgaactgcgcgctgctggtggcgtcggcggggggcaggtatttgctgatcgcggccttggggtaggccgcctgggcgcgttgcagttgctcgtcggcgctcagggcgtgcgcggcgctttgcaccttgagcaggtcgccgtacatcagcgggtcgagctggggtttgaacaggtagatgatgccggtcagggccagcagcaccatgaaaggggcgacgaagaggccggcgtagaagtgccagcgccaggccaggttgtagaaggaaactttttgagtgctcatcattgggctccgcaaggctttgaattttttgtgtctggttggccgtcatcgggggcttgcccccgatgctcctagaagctcatgtcgactttggtccagagcgttcgccctggctccttgatggcttgcgggtcggtggccgggtagccgaacccggcgttgccggccaggttcaggtgctcggcgtaggccttgccgaacaggttgtcgacgccggtgctgaccttgaagtgtttgttgatgcggtacgccgcgttcagcgagaacacgccaaaaccgccgctcttgtcgtagtccttgccgaccacgttgcccttgttggggtcgatgcggtgttgcgccgccaccacgcgccacaacgccccggcgctccagtcgtcttcgctgtaggtcaggcccaggcgtgcatccagcggtggcatttgcggcagcgccttgccgtcgctgctgttcttgccccaggcgtaggcgagggtggcgtcagccttccagttgcgcgtcagcttgtacgccgcgcccaattcgccgcccatgatgcgcgcgtcgacgttgcgggcctgggaggtggtacccatcatcccgggcctgtagtcgaacaggatgaagtcctgtacccggccgatgtaacccgaggcccaggcttccagatcgtcggctttgtactgcgcgccgaagtcgagctgggtggttttctccggcttcacaccgtcgaaggcattcaccgaaccgaccgcgccggtgttgggcgaaaacagctcccagtaatccgggaagcgttccgaatggcccaggcccgcatagacggtggtggggctgtcggccaggtcgtgttcataccgcacgaagcccgatggcagggtgtcggcgcgggtgtcgtcggcggtcgggttcgggcgggacatcatccccgagccgctggtttggcggaaatccttggccgaggcgcggtccaggcgtgcgccggtgatcaggcggtcgcggtcggcggcgtaccaggtcagttcgccgaacacgccgtagttatggaagttggcgtccttgacccggggcaagtccttgtaggtgtcgatgcccatgctgctgcgctggcggtgttcgttggtctgcgcgtcgaggccgctgatcagttgcacatcggcccagcgccaggtggccttgatccgtgcgccgagggtgcgccggtcgacgttggaggccatcggcccagccatcatcccggtgccggacggtgtgcgcaggctgtagttgtccatcacatggtcggcgtagttgtagtagacctgggcctcgaccttgtccagcacctcgccgatgttggacttttcaaagcgcagcccgaggctttcacgcaggaactgcgaaccgtccataccgcgcccggcgtaacgcgcttcgccatcgccacggccggcggtgagttccagcagggtgtcggcgtcgggggtgaagccgaccgccacatcaccgttccatttgtcatagcgcgaggcgacggtgtcgttgttgccgtccttgtagtcatcggcgtgggcctgattgccgatcacccgcacatagcccagcggcccgccggcggcggcatcgatgaccttgtcgaagcgcccgttggaaccggccagcacactggcgttgaggcgtgtgcccagctcgccgaactgctccggctcgcgctcgaacaggatggtgccggccgacgcgcccgggccccagagcacggtttgcgggcctttgatcacggtgagcttgtcgtaggtctccggcgagatgtacgaggtgggcgcgtccatgcggccggggcaggcgccgagcatcatgctgccgttggtgaggatgttcagacgcgagccaaacatgccacgcagcaccgggtcgccattggtgccgccgttgcgcaccagggcgaagccggggatggtcttgaggtagtcgccgccatcgctggcgggcaccggctggcgtgggtctttggggttggtgataacggtcagcgctgagctgggggcgatcgccgtgatcacggtgggcgtcagctcatgttcggcgtgctcgtcggcctgagcgtgaggtgccagtagcgcaccgcacagggcggcgagcacaggggtatatcccaaacgggtgtcagcagaaaacctggacatgacaaattccatcaatcagtcgtaaacaacacggccagcagcctgcggctgtctgtctaaagtcggccgggggtgaagtaacggtgttaagtgcttacgaagcgatgggcggcgcgcggctgcgggcgccggggaagatgctctgccgggcatggcccaggcgtgtggcgggggtgagggcgttggccggcggcgggctgctcagggtgaaggttgaaatgccgccgggcagggcggggcagctatagagcaggtcgcaatagccgcacttggaccagagggcgtggtgttcgtcaggtgccttgggttgatgggaggcgccgtggtccatcggcatgtccatcgacataccggcgtgatgatccatcggcatcgcttgggaaatcagcggaccgataaagatcatcagcatggcgaacaggctgatccaactgccgcttctcaggcgggcgtgtggagacaacctggcgcgaggggcgcccatcgcgtgtcagcctattgggcgtgcttatgctcgtgtgtcgccatcggtggcaccttctgcaccgacacttccacctcgaccttgccggccttttcgaaggtgagcgtcagcgggaattgcttgccgtcggccaacaggctgcggtccttgaggcccagcagcatcacgtgatacgccatcggcgcgaaggtcagctcgcccttggccggtacggcgacgctgggcacctgctgcatcttcatcaggtcgccctgcatcacatgttcatgcagctcggccttgtctgccactggcgtgtcgacgctgagcaggcggtccggggtctcaccggtgttgtgaatcacaaaataggcggcgacggtcggcgcattcggtggcaactcctgggaccagggatcgctgaccagcaggtcgccagccttatagtcgtcggcattggcagcactgaacaccggcagcaacaacgcagccagaagcagggatgatttgagcatggcagttctccagaacggttctaaacgcagttcaattgcgaagaagatcagaccgttggagaggcgcgggggttgaggctcggccattgctggcgcagggtggggctttgcagctggggcggcggcaagctctgtgaagtattgaattgggtgagatacaactgcggcacatgccccggcaacgccaccaacggcgccgagcccgagcagcaccagcaatgctgcatggtggaatgatcgtcctgctgctgcgccggaatctccagcttgcccagggcgatggtcttgaggctcgcgccattggaggaacagaaactgccccacagcaattgctggaccgggtcgctggactgttgcatcgcgctggccatcggcatggcaaaggcgttgaacagcactgcaaggcaggcgatccaggcaattgcaaagcgttgacgggccatggcggacaatccgtagggttaaacgatcaggcgggtatttagcctgatcgtaggggataagtaaaaaggggcggtgtggtttggtgtcgcagtgacgggtttgaggatagacgggtaatcgagtggatgccgatcttcaaagctgcacagttcaaatgtgggagggggcttgcccccgatggcggtgggtcagccgctgatttgttgactgagctgacgctatcgggggcaagccccctcccacatttggccggtgttcgacaatgaataggggcaagcagaaatatccgacaggcctttaaggttgtccctaggacactcaaactctagtctccgtacaccgctgcaaacgcagcggtcgggcgtcgcggcccggacttctccagacgccgaagcgtcattgcctcctttcagttggcgtttttttatcgtctactgtgcggcgctatggcggctgtgcgcgggataccttcgggtatgccggtgttctggagaatcggtccgcgaacctgcgtacagctgccacccccatcgcgtcgcggcgatcagtggcagctcctctattacttctccggagcttcacaatgatcaaacccaccccaaatcccccccaccggctattcaccgtagccgacggcttcagcaccgaagacctgttggtcaatctcagcgaaacccttgcctcggcgaatgcgctgagttgcgatcttgcgtttgacctggaaggctcgaaacgagatgaattgctcggcgttgcgcagttgattgagctggcgctgctgctggctgatcgtgtgcatgatggtgtagggcaaacgaaaaacgctgcgtgatgatgcagttctaaaggtgggagggggcttgcccccgattacggtgtgtcagtctatacatctgtgagtgatctaccgctatcgggggcaagccccctcccacatagaatcgatggtgtttagagagtggtgattgcctgtagaaccgcaggcacagtagtgaattctcgatccactgctgccaacaccggccgcttcaacaccaacaccggcactccaagctcccttgccacttccagcttcggctccgtcgcggtgctgccgctgttcttgctgatcagcacatcaatgccacgccgtgcgaacaacgcacgctcatcttcgatcaagaacggcccacgcgcgccgatcacttcacagcgctcgttccccggatacacatccaacgtgcgcagtgtccagaactgctctggcgggatctcatcaaggtgctgcaacggctctcgccccaacgtgaacaacggacgcttgaagggtttgagcgcttcaatcagcgaagcccaatcactgacctcgcgccaatcatcccccgcctgcggctgccacgccgggcggcgcaaggcccaacatggcacgccgctcaactgcgcggcctcggcagcattgcggctgatttgtgctgcatacggatgggtcgcgtcgagaatcagactaatcccctcattccgtacaaaccgcgccaacccctcagccccaccataaccgccgacccgcacctggcaggtcaggtcggtgggcacgcgcccaaccccggccaggctgtagatatgttccgggcccaatgtacgagcaatggccagcgcttcggtcacgccgcccaacagcaggatgcgtttcatagcggcttgaccacttccagcaaggtaatcggcaacgcctggcgccatgtatcaaactcccccaacggctgcgcctgagcgacatggatgcgcgtcagttcgccgccatactgcgcgcgccagttcatcaaggtcatttcgctttgcagggtcacggcgttggcgaccaaccgcccgccagggcgcaggtgttgccagcaggtgtcgagcacgccttcgcgggtcacgccgccgccgatgaagatggcgtctggtgcttccaggccaagcaatgcagcgggggccttgccgcgaatcagttgcaggccgggcacgccaagggcgtcgcggttgtgttcgatcaggccttggcggccttcatcggcttcaatcgccagcgcgcgacaactgggatgcgtgcgcatccattcaatcccaatggagccgctgcccgcacccacatcccacagcagttcgccgggcatcggcgcaagacgggcaagggtcatggcgcgcacatcgcgtttggtcagttggccgtcgtgcttaaaggctgagtccggcaaacctgcacgacgcgacaggcgagcagtatgggcgtcggccaggcagtcgatggcgacgaggttcaaatcggcgaccgaggtgtgttcccacgagtgcgccaacccgtcgatgcgctgctcatccgcgccgcccaagtgttcaaacacagacaaacggctagcaccgaacccggattcgcttagcagcgaagcaatcaacgccgggctgcgcccgtcattactcaacaccaacaaccgcaccccactggccaggtgcgcattcagcgccgccaacggccgcgccaccaccgacaacgtcaccacgtcctgcaacggccagcccaaccgcgctgccgccaacgataccgacgaaggcgccggcaagatcagcagctcatccgccgccacctgccgcgccaaactcgcccccacgccatagaacattggatcgccactcgccagcacacacactggctccccgcgccgcgccagcaccggctccagcgaaaacgggctcggccacacctggcgttcgccacggatacacaccggcagcaggtccaactggcgctgagcacctataatccgcgtggcgcgcaacagggcatgccgggcgttcctgcccagccccttgaagccgtcttctccgatgcctacaaccgtcagccagggcgacatatgaattccttgaacgacatccgacgggcaggcttttcatgccgccggacaaagcaggcataataccgcgcctttacccaccaaccggtagccccgtgaacccaacgcccgctgtgaataccttgcgcccctcggcctgtccggggttgctgcgtattgtccaggcgttggatggcggtatttgccggatcaaattggccggtggttcgatcaccagcaagcaagcccaagtggtggcagatgcggcccaggcctatgcgggcggggtgatcgaggcgaccaaccgcgccaacctgcagattcgcgggattggtgcccaagagcaggcattgatagccctgctactggacgcaggcctgggtcccaacaatgccgccggcgacgatgtccgcaacctgatgctcagccccagcgccgggatcgacccgcagatgctgttcgacacccgcccgctggccgatgagatcctcgccaccctgcaaaaccacccacgtttccatgaactgtcagccaagttcgccatacagctggatggcggtgaagccctggcgatgcttgagcatcaccacgacctgtggctgtcggccttcatccgcaacggccagacgctcctcgcgttcggcctggccggttgcccggggctggatgcgccactggccgccgtgccgctggagcaggggcatgcgctggtggtggccgtgctggaggcgtttctgaacattgccactccagaacaaacccgcatgcgccacctgcctgtggataacgtgctgagtcatttaaaccagccgctattgcctgttgatggcttcaaacgccagcccagcggggctttgctgcaccttggcacttatccacaggatcaaaagaatcagttttatgttgccgccatcgcacccttgggccgcctggatgcgacgatgctcaaaggcgccgcgcaactggccagcgagtacggtgatggcaccctgcgcttcaccccttggcaaggcgtgttgctgcccaacatcgaaaaaccgtacgccgtgaccgagcgcctggcgcaactgggcttcctttgctccatcgatcaacccctggcgcgcatgaccgcctgcaccggcgccagcgggtgcggcaaggccctggccgacaccaaggccgatgccgtgcaactggctgccttgcagcccggccatgacgtgcacctgtccggctgcccccgttcctgcgcggctgcgcacgttgcgccggtcaccttgctggcggtgagccccggccactacgacctctatttccgcgacgcagcccaacccggtttcggccggctgcacgcgcgcaccctttccattgaagcggcgggcgccctgttgcgcgctcgtccacggagcaacaccgatgattgattacatccgcgacggtcaggagatctatcgcaactccttcgccattattcgcgcggaagccaagttggagcgcattccggccgacctggaaaaactcgcggtgcgcgtgattcatgcgtgcggcatggtcgaggccatcgacggcctgcagttttccgaaggcgcgggcaaggccgggcgcgatgcgttggccgctggcgcgccgatcctgtgtgatgcgcggatggtctccgagggcgtgacccgcgcgcgcctgccggccaataacgcagtgatctgcaccctgcgcgacgacagcgtgccggcgctggcgcgggagctgggcaacacccgttccgccgccgcgctggagctgtggcgtccgcacctggaaggcagtgtggtggtgatcggcaatgcgccgaccgcgttgttctacctgctggaaatgctcgatgccggtgcgcctaaacctgccttgatcctgggtttcccggtcgggtttgtcggtgctgccgaatccaaggcgatgctggcggcggacagccgtggcgtgccgttcgtgatcatgcagggtcgcctgggcggcagtgcgatggccgccgccgcggtgaatgccctggccacggaggtcgaataatgccggcacgcggacgtttgatcggcctgggcgtaggccccggcgacccggaattgatcaccctcaaggcgctgcgcctgctgcgcgaatcgccggtggtggcgtatttcgtggccaagggcaagaagggcaatgccttcggcatcatcgaagatcacttggtgccccaacagaccctgatgccgctggtgtacccggtaaccaccgaggtgctgccggcgccgatgtcctatgagcaggtgatcagcgatttctatgacgccgccagcgtcgatgtcgccgcgcacctggatgccggccgtgatgtggcggtgatctgtgaaggcgacccgttcttctacggctcctacatgtacctgcatgaccgcctcgccgaacgctacgaagcgcaagtcatccccggcgtgtgctcgatgctcggcggcgcctcggtgctgggtgcgccgttggtgtatcgcaaccagagcctgtcggtgctctcgggcgtgttgccccatgaggatctgaagcggcgcctggcagacgccgacgcggcggtgatcatgaagctgggccgcaacttcccgaaagtgcgccaggtgcttgaagaactcggcctggccgagcgtgcgctgtacgtggagcgggcgaccatggccaaccagaagattgtgccgttggatcaggtcgacccggcgtcttcgccgtacttctcactgatcatcgtgccgggcgaaaggtggcaaggttgatgaacccggcgattgtcattctgggccagggcagcctggccaccgcgcgccggatccaacagctctaccccgaggcgcggatccacggtctggccgggcgcgttggaggtgctgaccagacttacagtgagttcggcacgaccttgcgccagttgtaccagcaaggcacgccgctgattgcgctgtgcgccgccggtatcgtgatccgcaccctggcgccgctgctgctggaaaaaggtgaagagccggccgtgctggccgtggcggaagacggcagcgccgtagtgccgctgctcggtggccttggcggtgtgaacgtcatggcgcgcgagattgctgccgcgttgaacgtggccgctgcgatcaccaccagtggcgaactgcggtttggcacctgcctgctcaacccgccgcagggctatgagctggccgacctcgagttgggcaagcggttcgtttccgacctgttggccggtgaaagtgtgcgcatcgaaggtgtagcgccgtggctggatcaggccaacttgccgcaggatcaacaggcgcgcctggcgattcatgtcggcagtgccgagcgccaacccaccgccaatgaattgctgatctacccgaagaacgtcagcgtgacctgcaaacccggcgcgcaattggccgagcgtgtgcgcacggcattgcatgaagcgggtatcgccgtgcaatccctggcgtgcctgctggccagcgaaacgcagatggccgaagcgtcgttgcgtgacgcggcgttggaactgggggtgccgctgcgttttaccggcgtttcccaggacgccgatatcgtggtcagcgtggctgaacagccgctggacttgtcgcagatcggtcgtgttcgtggccgccttgccgtgatcggcctgggccccggtgccgccgagttgatggtgccagcggtgaaggctgaactggcgcgttgcaccgatgtgctgggttacgagacctatgtgcgcatggccggcccgttccgcgaggatcaagtgcaacactgcaccgataaccgcgaagaaatgcagcgtgcccgtcacgccttcgagctggcggcccaaggccgttcggtggtggtggtgtcgtccggcgacccgggtgtgtttgccatggctgccgccgtgattgaggcgttgcacgaatccagcgacccgacctggcatcaggtcgacctggagatcctgccgggcgtctcggcttcgcttgccactgccgcccaggccggcgcaccgttgggccatgacttctgcgtgatgtcgctgtcggataacctcaagccctggtcgatcatcgaaaagcgcctggacctggcgtcccaggccgacctggcgctggcgttctacaacccgatctcgcgttcgcggccttggcaactggggcgcgccctggaaatcgtcgccctgcatcgcacaccgcaaacgccggtggtgctgggccgtgatatcggtcgcccggggcagagcctgcgtgtcactacgttggggcaactgacgccggagcaggtggacatgcgcaccatggtgctgatcggctcgtccaccacctgcacattcccccgtgccggtgggggtgaatgggtctacacaccgcgctggtacggtgaaaaacccgcctcctgaaaacggcctgtcgtctgcctgaaagcgccgaattgcccagggattttcctggcgttgttcggcgctttttcttttttttgcgacgaaatatggaaactcacccgtgatgccgcgttattgctgggcgttgtggttcaacgggttgcgccaagggatttttatcgtctggaaagcccatcggccagtgaactagggtggacacaagccccacgttggggtgcttgtggagaatcaaaatggagcgacatcacagacggatcaacagtacaaaaaggcgcaagttgattgccgcctacaaattaccgggcgcgtcaggcaagcacgcgtctgtaccgctggacaccgaagatgacttcaatgcggcggtggtcaacaacagtgtgatttcgtttgccgaaggcctttcgggtctgaaccgagagtacgtgcgtaaaagttatctgctggccagcagctacgtcagcgatgtgttgaatgtgcaccgcggtaccgaggactggtacgacgaattcatcaaggtgatggtcagcctggggtggctcccggtgcgtagcagcttcgaacgggtctcacgttcgggcaaggggctgaccgtgcagttggcggcgctgaaccttattgccacgctgttggcttccacgtccttgtccgcgccgctgcttagcgtgatgccgaaactggcggcggatgcactggaggcgttgaagcaggcgccggcgtcttttgaattgttcaagcgcaacagctcggtgcaccagggcggtgatttcggcctggcatcctgtgccgaaaccgatggcgaattgacgatggtgctggtgacctacagcactcacggcgtgagcaaacaggtagggctgcccttcctggagtgggacagttcctcgtgcgaggccttcagcgggcagacgtgcctggtgctgaatacctcggtggtcaacgaaaagacgatccaactgatgcgcgagagcgcgggagacaaagtacaactggcgattgccaaataccggatctaaggcaccaggtagccgcgtaccccggtgaagatgatctgcgcggccagggcgcagacgaacaggcccatcaaccggctgacaatctgcaagccctggtcaccgaggatgcgttcgatacggttggacaggtacagcaccacgcccaccgtgaggctggccagggcgatgctgaggatggcggtgagcttgtcatcccagtgcggttggctcacgcccatcaccagcagcgcaccgatggtgccggggccgacggtgagtgggatggtcagcggcacgatggtcacatcctgctgcacgttgtcggtctgcaccgccgacttgccctgggccatgcccagggcggaaatgaacagcacactgccggcgccgatgcggaaggcgtcgacggtgatgccgaacacactgaaaatcacccggccgaacaggtacagcaatacgctcgataccagggtcgccaacgccaccttccacgccaggcgccgccgctctttgctggaatagccacgggtcaggctgataaagcaggacagcacgaagaacgggctgtagagcaccagcattttcaggtagacgctgaataacacgtggagcatgggggcggctcgcaggaggaaagtgtggagagtctatcaggcgccagagatcaaatgtgggagggggcttttgtggtgagcgggcttgccacgcgctgggctgcgaagcagccccaataagaacgccgagttatgtcaggcactctgcggcgtttggttttagggccgcttcgcgccccagcgcggggcaagcccgctcaccacaaaaaccagttcctacaggagggcagcgtttcaagttaagacggggcgtgctcgggcctttgctgacgctgcgccacccaaaactccaccagctcgcgcaactgcgacaactccaccggcttggccatatgcccatccatcccggcctggcgcgcacgctccttgtgttccgacagaatgtgcgccgtcaacgccaccaccggcgtgcggatgcgctggtggctgacttcccaggcacgcagctgctgggtcgccgagaaaccatcgaggatcggcatttcgcagtccatcaacaccaggtcataacgctgggccttcattgcttccagcgcttcctcgccattgctggcagtgtccgggctgaggttgagcttgccgagcatgccgcgaatcaccttggtggagatgctgttgtcctcggctaccaggatgcggaaatccgtcggcacggtgatggcggccggagcgctgaggaccgggcgtggcagcacgttgcctttgctgcgttgggtcagttcatccgccagggtggtcttgagcgtgtagccggccaccggtttggcgaggatgcgcttgatcccgcaattgcgcgcgatgatcttgctcggcgcgttgctgatgccggtgagcatgatcagcaggatgtcgtggttcaggctcgggtcttccttgatctttgccgccagttgcatgccggtcatgccgggcatgttctggtccagcagcaccacatcgaagtaatcgcgcaggtgcgccttggtgcgcagcaacgccagggcttccttgcccgagggcacggcgctgacgttgaggccccaggccgaacattgttgcaccagtactttacggcaggtgtcgttgtcgtccaccaccagcacgcgcgcgcctttgagcgggccgtcgaggtcggaggtcgggtgttccaggcgttccgggtccagcggcagggtcagccacagggtgctgccctggtggctgccgctcttgatgccgaactcgccattcatcaacaggatcaactggcgggcgatgaccaggcccaggtggccgttcaaacgggtggccgagaagaaattcttgctgtgcagttcgctgtgcagcagggcatcgcgctcggcgggttccatcggcaggccgctgtcttgcacggcaatgcgcaggcgtggcttggtgctgcggtcgtccagggccaccacgatcagcacttcgccttcgtcggtcttttgcagggcgttttccagcagactcaacatggcctggcgcaggcgcgtcgggtcgccgctgatcacgcggggcacctggggctggataaagctgatcagttcgacgttctgctgctcggccttggcgcggaagatactcaggcagtcttcgatcagagcgcattgaggtcgaactgcacatcgtccagttcgatctggccggattcgagcttggagatatcgaggatttcattgatcagcgtgagcagttcgttgccggcgctgtggatggtttgcacgtagtcgcgctgcttcaccgacagtggcgtacccagcagcagttcggtcatgcccaacacaccgttcatgggggtgcggatttcgtggctgatcttggccaggaactcggccttggccgcgatttcggcattgctcgccgccaggtcgcggctgaggctgaaacgcgcctcgacaatcgcacgctggcgttcgcccaacgccaggctcatcagcaggccgctgaggcagataaacgccagcagcgtgacgatcaggccctggggcgagaccatcgtcaggcccagcaacgccggcaggatgatcagcgtaccgatgttgaacaccaccatcgccgccacgaacaggcgtgccgggcggtagcctttctgccagtgataggctgagacaaacagcatgctcaagccggcgagggccaccagggcgtaggtgatgatgttcagcggcagggtgttgacgaacaacagcaacaggccgcacagcacgatgaacaggatgtccgccatcaacagcttgttcagcgggtgcgggcccaggggcatgaagaaacggtaggcaaacatcaaaccgcagggtgcggtgagcagcagcgccaggtaggcgcctggtgtctggattgcatgccagttcggcagccatggccctaccaggttgagcagcagcgccaggctgagcatcagcagcacttcgcacgccgccagccacaggctgctgcgcgagcggtggtaggcgaagcgcgtcaggttgtgcaggatcagcatcagcaggcagccgaacagcaggccgtagatcagcgtctgggtctggtcggcggcggcgagtacggctggttccagggtgatgtaggggcgcagttcgtgttccgagaccaggcgcaggtaaacctcgaggggcttctggctctggggcagcggcagcatgaagtcactgctgggcaacggtcgttcagcctggggctggcgtgtgccggtgctctgttgttccaccagggtgtcgccgtccagcacgtagaggctcaggtgcgacaggtccggggcgaatacccgcagcacttgttcgtgcttgccgggttgcagcttgaaacgtacccacaacgcaccgtccggttccgcggcggtaatgcggtccagttcgatggggctgaattggttggtgtagcgcgaggaacggatgtcgctcagctgcaggtcggcctgttcatcaagcaatactgcccagccactgccttgcgcggcggcctgggccgggaacaagcagagcagtgtcagcagactgacagtgaaacctatggcgatcctgagccagcgcacggcgaaatcccttcgtaggttgatgcacggttaactatgcgcgggtaggcctgcatacggcaagggccagaggcccctgcctagccgaacggatagctgcttactggttctcgccacgctcccgcgcaatggcgcgatagccgatgtccttgcggtagaaacagcctttccagtcgatcttcgcggccagcttgtaagcctgttgctgcgcggcgtcgacgctggcgcccatggcggtggcgcatagcacacggccaccggccgttacgacctggccatccttgagcgcggtgcccgcatggaacaccttgccttccagcgtagcagccgcgtccaggccttcaatcacatcgcccttggcgtagtcggcagggtaaccaccggccgccagcacaatgccgacgctcggacgtgggtcccactgcgcttcaaccttgtccagggcctgggccaatgcggcttccaccaacagcaccaggctcgattgcagacgcagcatcaccggttgggtttccgggtcgccgaagcggcagttgaactcgatgactttggggttaccggctttgtcgatcatcaggccggcatacaggaaaccggtgtacacattgccttcgtcggccatgccgcgcacggtcggccagatcaccaggtccatgacgcgctggtgcacgtcggccgtgaccaccggggcaggggagtaggcgcccatgccaccggtgttcgggccggtgtcgccgtcgccgacgcgcttgtggtcctggctggtggccatcggcaagacgttcttgccgtcgaccatcacgatgaagctggcttcttcgccgtcgaggaactcctcgatgaccacgcgggagccggcatcaccgaacgcgttgccggcgagcatatcgcgcacggcgtcttcggcttcctgcagggtcatcgccacgatcacgcctttaccagcagccaggccatcggccttgatcacgattggcgcacctttttcacgcaggtaagccagggctggctcgatctcggtgaagttctggtagtcggcagtcgggatcttgtggcgggccaggaaatccttggtgaaggccttggagccttccaactgggccgcaccggcggtagggccgaagcaatccaggccacggctgcggaacaggtccacgacacccgccaccagcggcacttccgggccgacgatagtcagggacacattcttttcagcgaagtcggccagttgctcaagggccagcacgtcgatagcaacgttttcgcacttggcttcaatggcggtgccggcgttgccgggggcaacgaagactttctggacgcgtgggtcctgggcaactttccaggccagggcgtgttcacggccaccgctgccaatgatcaaaacattcatttcaaaaacctcggatgacgcaaattcttgggaacactgtgggcgcttttctgtgggagctggcttgcctgcgatgcgggcgcctcggtgtaacaagtgcaccgaggtgatgctatcgcaggcaagccagctcctacagaagccagtgcccaccaggcaatgttggatcagtggcggaagtggcgcatgccggtgaagaccatggcaatgccggcctcgtcagcggcggcgatcacttcggcatcgcgcatcgaaccacccggttggattacggcggtcacaccggctttcgcggcattgtccaggccgtcacggaacgggaagaacgcatcggaagccattaccgaacccaccacctgcaaaccggcgtgctcagccttgatcgcggcgatacgcgccgagttcacccggctcatctggccagcgccgacaccgatggtctggcggttcttggcgtagacgatggcgttggatttaacgtacttggccaccttccaggcgaagatcaggtcgttgatctcttgctcggtcggcgcgcgcttggtcaccactttcaggtcggcgctgccgatcatgccgatgtcacggctctgtaccagcaagccaccgttgacgcgcttgtagtcccaggccgccgcgcggtcagccgaccactcgccgcaggccagcaggcgcacgttggctttggcggcgacgatggcgcgggcttcttcgctgacgcttggggcgatgatcacttcaacgaactgacgctcgacgatcgctttagcggtctcggcatccagttcgcggttgaaggcaatgatgccgccgaaggccgattcggtatcggtagcgtaggccagttcgtacgcctggcggataccgccttcagcgtccgggctcacggccacgccgcacgggttggcgtgcttgacgatcacacaggctggcttgacgaagctcttcacacattccagcgcggcgtcggtgtcggctacgttgttgtaggacagctctttgccttgcagttgggtcgcggtggcgatgcccacttcggcaggcttggcctccacgtagaacgccgcgctctgatgcgggttctcgccgtagcgcatctcctgggccttgatgaactggctgttgaaggtgcgtgggaactggctgcgaccttctgtgcttagggtttcagcggtctggttcacggtgcccatgtagttggcgatcatgccgtcgtaggcggcggtgtgttcgaacgccttgagcatcaggtcgaaacgctgggcgtaggtcaggccaccggccttcaggctttccaatacgttggcgtaatcactggcgttgaccacgatggccacgtctttgtggttcttggccgccgaacgcaccatggttgggccgccgatatcgatgttttcgatggcggtcggcaggtcgcagcctggcttgttgatggtggcttcgaacgggtagaggttaacggccaccagatcgatcggcttgataccgtgctcggccatgatcgcgtcatcggtgccacgacggccgaggatgccaccatggatcttcgggtgcagggtcttgacccgaccgtccatcatttctgcgaagccggtgtagtccgccacttccactgcggccacgccgttgtcctgcagcagtttgaaggtcccgcccgtggagaggatttccacgcccagagcttccagctcccgggcaaattcgaggatcccggtcttgtcggagacactgatcaaggcgcggcggatcggcaggcgggtagtctggtcggtcatttcaatttccatcaaaagcaaaggagtcagcaaaaaaggcgaccggttttacgcgggcgcctttctggtttgattgaatgcttacagcaaatcgtattgcttgagctttttgcgcaaggtgccacggttgaggcccagcagctcactggctttggtctggttgcccttgacgtagttcatcacgctttcgagcaagggcgcctcgacttcggagagcaccaggttgtacacgtccgtgacggaagcgccctcaaggtgggcgaaataattgtgcagcgccttctcgacactcccgcgaagggtctggccttcttcgctcggcgtgttgaggtgctgtttcaaattgacgttgtcgctcacgggtgttgttccactcactaaagtctcggtcatcatcgtcatgcggccaccccctctccgtcccctgtccccaggctcttgtaacgctcgctgaagaactcacgaacgttggcgcattgtgcttccgtatcatccaaacgattgaagtgggcgcgaaactccctggcgcccggcagggttgcgagataccagccgacatgcttgcgagcaatgcgtactcccatcacatctccatagaaggcgtgcagggcggccagatgctctagcagaatacgttccacctcgattagctccggtgccggcaacacttcaccggtacgcagaaaatgctcgatctcacgaaaaatccacggacgcccctgggcggcccggccaatcaacaagccatcggcaccggtggcgtgcagcacgcgccgggccttctcggcggagtcgatgtcgccattggcgaataccggcatcgataccgcctgcttgatcgcagcgatggtgtcgtactcggcttcaccggtgtaaaggtcggcgcgggtgcggccatgcaccgccagcgctgtaatgcctgcctgttcagcgatcttcgccactgtcaggccgttcttgttgtcccggtcccaaccggtacgaatcttcagggtgaccggcacatccactgcggcgacaacggcctgcaggatctcggctaccaactgctcatctttcaacagggcggaaccggcggccttgttgcagaccttcttggccgggcagcccatgttgatgtcgatgatctgcgcccccaactccacgttggcccgggccgcatccgccagcatctgtgcatcgccaccggcgatctgtaccgagcgcggctcgggatcaccttcgtggatcatgcgcatccgcgatttgcgggtgttccacaagctcatgtcgctggtgaccatttccgagactactagacccgcgcccaaacgcttgcacagctgacgaaagggctggtcggtgacgcccgccatcggggcgaggatcaagccgttctgcaatgtgtatgggccgatgcgtaccgccgacataggacttccctgttgtggggccggatcattagagttcgaaaaagggttggcatgatacccgctctcgatgactggataaaggctgaattggataaaatctgaacagttatttctttatcgccagcggtttggttgcgcaggggaaagtcaataacctgccgtcaaacctcaatgcatgaaccgattcactcgggcgagtggaagctcaggctgtaattcacggctttgttgcccggatcgaggatatccagggagatatggatcggggtttgtgatggcatttcgctaacgccggccaactcaccgctgaggtattcggcgggtttgaagcgacggctggcaatcaggttgccgttcaggtcggcaaaacgcagctccagcagcgggaagggctgggagaaggttgcacggttatagatgatcgcatccaccaccagcgccccggcgaaatcggggtggctgcgcaccaccaggttactgctcttgatatgggcgatatcgacccgcgacggcactgtgcaacccagggtggggcacagttgctggaaccacgggcgatacgcgtcctggcgggccaggtcgtcgaattggtaggcgatgtattggcctgcgaggccggcggcggcgatcaggaccagcagcagccagaccaggcgacggcccaggcccgtcgggcgtttgtgtgcgtagaggtgcagcggatcgtcttccaggtcctggagcaaatcgtcatgggcgctggtttcagcgcgtgggcgcttgcggcggggtggcaggcgatcttcggggtcggccgctttggtcagcggcgtgaacggtgggtcgatgtcgtcatcgtctggtgttgagcgcaggggtggctcatcgtcgagatcgtcggtgtggagcgacatggacggttcggtgcgctgcctggtcgcaggttctggctcgttttcgctgtcgtggaggcgctcttcaggcggctcgctgaacaggcttgccgcccatttctcttcttcggccttgacgctgtcgcggctggcgctgagaggctcgtccttttgtcgacgatcggcgcccgcatgccggcgttctgcgcccgggggcagggtgtgctgaatctcgcggcgttccagcttggccagttcttcgtccaggtccaggttgtccaggtccagctcttcggcggtccactgtttctggctgatggcgcgcggcgcctcggcagtggtctcgggctgcggcgccggcgcctggccgcgttgctccaacagctggcgggccgcattgaacacttgcaggcacgagccgcagcgcaccacgccacgggccacgctcaattgagcgtggctgacgcgaaagcgtgcttggcaatgcgggcactgggtgacgaaactgtcggtcatgcggccatccgattcaggcaagcgctcattctagcgccgacgaccgctgatgcgtacccagccatcgcggttggcgatcggatccagctcgaaatccttggcgtaggcggcggcgacgtcttcgccctgctcggccaggatgcccgacagcgccaggcggccgcccggcctgaccaggctcgacagttgcggcgccagcgccaccagcggcccggcgaggatgttggccaccagcacgtcggcctgtacctggggcagttgctccggcaggtagagtgggaatttgccttcaggaatgttgttgcgcccagcgttgtcgcgggaggcttccagggcttgcacgtcgatgtcggtgcccacggcttccttggcgccgagcagcagggcggcaatcgccaggatccccgagccgcaaccgaagtccagcacgtggctgtcggtcaggtcctggccgtccagccattccaggcacagcgcggtggtcgggtgggtgccggtgccgaatgccaggcccgggtccagcagcaggttgactgcgtcgggctcgggcgcggcatgccagctcggtacgatccacaggcgctggccgaaacgcatcggctggaagttgtccatccagctgcgttcccagtcctggtcttcgatgacttcgctgtggtgctctggcagcgggccgccggtgagcagttccatatgggccagcacggcgttggcgtcggtgccgtcttcgaacagggccagcaggtgggtgtgggaccacagcggcgtggtgttgagttcgggctcgaagatcggttggtcttcggcgtccatgaatgttacggagacagcgcctacttcgaggaaagcgtcttcataggtttcggcttgttctgggctgatggcgagacggacttgcagccaaggcatggcgggcacctttgaaaaaatgagtgtgcagcggggtggggctgcgaaagggcgcaagtttacgcgagcgcacagaagaagacgacatacaccgatcaaatgtgggagggggcttgccctcgatggcgatggatcagacacagctgcatcaactgacactccctcatcgggggcaagccccctcccacattggaccctgtacatccagaaattccagggcccagacacaacaaagccgcccggaggcggctgtgttgtttggagcacttactggttggccagcttgtgttccaggtagtgaatgttcacaccaccttcgcagaagccttcatcacgtaccagttcccgatgcagcgggacattggtcttgatgccatccaccacgatttcatccagggcgttgcgcatgcgggccatggcctcatcgcgggtggcgccccaggtgatcagcttgccgatcaacgagtcgtagttggacggaaccttgtagccgctgtacaggtgcgaatcgacgcgaacgccgttgccacctggagcatggaaatgcttgaccaggcctgggctcgggataaaggttttcgggtcttcggcgttgatccggcactccagggagtggccgtggatcttcacgtcgtcctgggtgaaggacagcacgttgcccgcggcgatgctcagcatctccttgacgatatcaataccggtgaccatctccgagaccgggtgctctacctgcacgcgagtgttcatctcgatgaagtagaaacgaccgttttcgtacaggaactcgaaagtacccgcgccacggtagttgatatcgatgcacgccttgacgcagcgcgccaatacttcctggcgggctttttcgtccaggcccggtgccggggcttcttccagtaccttctggtggcgacgttgcagcgagcaatcgcggtcacccaggtgaatggcgtggccctgtccgtcggacagtacctggacttccacgtgacgtgggttggtcaggtacttttccaggtagaccatcgggttgttgaaccaggcgcctgcttcggagcgggtctgcttggcggcttcgatcaggtcttcttccttgtgcaccacgcgcatgccgcgaccaccaccgccaccggcggccttgatgatcaccgggtagccgacttcgcgaccaatgcgcagagcggtttcctcgtcttcaggcagcgggccgtcggaacctggaacggttggcacgccggcagcgatcatggcttccttggcagagaccttgtcgcccatcaggcgaatggtctcggctttcgggccaatgaaggtaaaaccggatttttccacctggtcgacaaagtcggcgttttccgcgaggaaaccgtagcctgggtggatggcggttgcgcctgtcacttctgctgcagcgatgatgcttgagactttcaggtacgagcttgtagccactggcgggccgatgcagatgctttcgtccgccagtttcacgtgcatcaattcagtatcggccgtcgagtaaacagcgacggtcttgatgccttgttccttacaggcgcgcaggattcgcagggcgatctcaccgcggttggcgatcaggactttttccagtttcttcgcaggtttcaacatcgaaggcactccgcggttcaaacgatggtgaacagcggctggtcgtactcaaccggctgaccgttttctaccaggatggattcgatgacgccggctttttcagcggtgatgtggttcatcatcttcatcgcttcaacgatgcagatggtgtcgcccactttcacggtagcgccgacttcaacgaaggctggcgaagtcggtgccggggtgcggtagaacgtaccgaccattggcgacttgaccacgaagccgttcagcgccggagcggctggggcggcaggtgcagcggcagcagcaggcgcggcggccggagcagcagcggccggagccggcgcttgcatctgtggcgcgtagaactgttgggccggggtcttgctgtggcggctgatccgtacggactcttcgccttccttgatttccagctcgtcgataccggattcttccagcagttcgatcagtttcttaactttacggatatccatgaatcatcaactcccaagggtcggtcaggggcgcttggccggttgttcaagttgttccagggcggcctccagggccagtcggtacccgctggcgccaaggccgcagatcacacctaccgctacatcggagaagtaggagtgatggcggaaagcttcgcgtttgtgcacgttcgacaaatgcacttcgatgaatgggatgctcaccgccagcagcgcgtcacgtaatgcaacacttgtatgcgtaaaagcggcgggattgatcaggataaagtccacgccttcgccgcgcgcggcatggatgcgatcaatcaattcgtactcggcattgctttgcaggtagagcagatggtggccggcttcacgcgccctgcgttcgagatcaaggttgatctgctccagggtgactgccccgtagacgcccggttcacgggtgccgagcaggttcaggttgggtccgtgaagaaccagtaaggtcgccatcggctgttccttgttattgatgtgggtacggcagaacccggcgactatgccgcaaagcctttgtgactgtccagttctatgcagtaggcggcacgattagcgaggatagcgcgaaaattgtgactgtggggctggattcggtcattggcaacaccgtctcgaatcctgtggagatcgtgtcagacgcggaaggcttgaacggcagtgttgagctgcccacccagcaccaacaactgctcaccctgtcgtcggccctgtccgattcgcagcaaattatcctcacccaactgatgaatccgctcactgttgtcgcgaatctcactgacggcaccactctgctgcgcggtcacatcggcgatgcgcacggcggtctcggagatggtctggatcgcgccgacgatttcatccagcgcaccgtccgctgcctgggcttgctgggcggtggcttcggcgtgttcgacctgggcgcgcatgccttgcaccgattggtgggcggcgctttgcagcccggcgatcaaggtctggatttcggcggtggcgccagcggtgcgttgggccagcgagcgcacctcgtcggccaccacggcaaaaccgcgtccggcttcaccggcacgggcggcctcgatggcggcgttgagggccagcaggttggtctggtcggcaatcgagcggatcaccgtgagtaccccgccgatggtggcagattcctcagcgagtttttcgatcatctgcgcgttttgctgcacttcgcccaccagggcatgcagcccggtcaggctcaggccgatcacgcgctggccttgctccaccgcctggccggcgctgcgactggcaccggcagcctggctggcgtcgccggcgacttgctggatcgtcgcttccagttcgcccagcgaatcacggatctgcgcggtatccccggcctggcgttcggcgccgtcgtgcaggccgctgctcagttcggcgagggtgcggctgctgccggcgacttcctcggcgttgccgcgaatggtgccgaccaaatccaccaggtaggcgcgcaggcggttcagagacgcttcgatatcgtgcagttcgcggttggtcttgcccagggcaatcggccggctgaagtcaccttcggcccaagtcgacagggctggcgccaggttggtcagcactcgcgccagcttgcgttgcagggtgtcgatcaatagcgcgatcaacaggatcaggccaatcatcagcccttgcatcaggcgcacttcgccctggatcttggcgtgttgcgcacgcacgaccggctccaggccggcgatggcttgttgcacggtgttgattttctggtgggttttggcggccaggtcggtgcgttgctggatctggtcgcgggtgcgcttgagttcggcggggtagcgggtcagcaggctgttgagttcacgcttgaggtcgacgccggtgtcttgggcttcagttttttcgctgttctccaggcccatcagcgcagaaaaatcatcggcgctggactcggcgctggccttcacgccgagcaacggcagttgctccagcaggtcggcctggctgcgaatgttgccgacttcgcgttccacatcgtcggccagttccgcacgcccgctgctcaccagtttgtcgcgggccagcgacaacttgcccagatgctgggaggcggccagcaacggcggcagatagcgggcggcttcgggagaactcacgccgatggcgtactggctcagttgctccaggttggcgcccaattcacgttcggcttgcagcagcaaggcttgcgggtcgcctgccagcttgccggccgccagcaagtcggtcttgctgaacgcatccaggtccaccaggcttgggcgcaggttctgcgccaggtccgccggcagttcatccagatgctgtaccaggctttccaggctctggcccgcgctgctcaagcgcagggcgtcgccgctggccaggtagtcgtcgatattgcgcgcggcttcgttctggaaactctgcgacaggcccaggtagcgctccatcagcaaatagggccgctccagcgcccgttgcgaccaccacaacgtcgcccccagcgccaggcacacggccaccagaagaagggtattgagattggtcagcagcttcaggcgcatgcgtggtttcaaccgacagcaaaagataagtgcctgaagttattgcgtttccgttacaaagttatgacggaatcagtggattccggtgaaaagatggcactttgctttgatgtgcgtgcggcttgcacacgattgcgcccagcgtccttggcacggtacagcgcctcgtcggcctgggcggccatcatcaggctatcggagccgtcgcacagctccaccagtcctgcgctgaaggtgcaccacaaatcctggggttgcgccgggtagtggatctcggcaaagcgcccacggatttcatccagcactctgcaggccgattccagatcggtgtcgggcatcacgatggcgaattcctcaccaccatagcgcccgatgtagtcggtcttgcgcaggcgctgcttgagaaacagcgccagactcttgatcacgcggtcgcccatggggtggccgtggctgtcattgacccgcttgaagtggtcgatgtcgagcatggcaaagctcaatggcttgttctcgcggcgcgcgcggaagctgcagtcttcgagcaattgcaggatgtgggtgtggttgtacaggccggtcaggctgtcgcgtaccatccgcgccttgaggttgcgcgcccgcgccgcgcggttgcgcacggtggtgatcaggtggcgcggcttgatcggcttggtgaggaagtcgtcaccgccttcgctcatggcgtccagttgcttatccaggtcgtcttcggccgacaggtagatgatcggcacgctgacgtaacggtcgttatggcggatgaccttggccagttcggtgccggtacaggcgggcatgtacatgtcgaggatgatcaggtcgggctggaagtccgccagctcggccatggcctggatcggctcgatcaaggtgcgagtgacgatgccggcactgttgagcaggcgctcggtgtgcagtgcctgggcccgcgaatcgtcgatgatcagcactttatacggttcgtactgggcaacgcaggtcagtacttcgatcttttccagcaggctggaagcttccagcgtaccggtgaggaattcctggcccccggcgcgcacggcggccaggcgggtcggggtgtcggtttcgtgcaggctgaagaacagcagcggcagcttctgttccaggccttcctgggcttcggcggcgagcttgaggcccaggccggcaccgcagaaatccacgtccatcacaatcgccgaaggcaggcgctcggccatcgacgcacgaaacgccgccacgctgtccagggattgggcgctcatgccaaagaactccaactgcttggccaggcgctcggcacggtcgtgatcggccagcatcacgtagatcggcttgcgcatcggcggcaggaaggtttgctcaagctggtcgccctggcgcaggccggtacgggacaggcgctgcatcaggcggttgagttcggtgatcagttggctgctcaggcgcccgcggttttcgttcacggccttgagagactcgccgatgtggtgcgcgagctggctgtgttccggctgttcgaaacgctcggcaaagcgcagcaggcgcagattggcctcgctgagttcggaaaggtcggtgccggaccactcgctgcgttgcaggcgctgccagatctcaagaatttgacgtgcctgatgaattacccgctgggcaaaatgctgcttgaggcgctcacggctggggtcttctggctcggtcatatcctgactactagtgagggtgcatgctgaggtcgactgatggctctatgctagcacctctttcccatgggatgagtgtcatacgtcaataaactgtgcgtgcggagtattcagttgctgacccgctggtcgctcggcgtaaaaagcgtgcatcctttatagtccaacaccctctgtgcgccagtttggcgaaaagccccgcacgggcgggcacgatggggtagggttgtggtcggagtgtttgaacgcacgccatcaattcaagtgcatgaactcaagtgattgaaaggatatcgccatgctggactggaaaaaccgtgcaggcagtgccaaaggccccgcccctgagcccaagtcggccaaccgcagctattttcgtaccttgctgatgagccgcgccgtgctcagcgtgctcggcctgtacctgttggtcacgggcgccctgggctggtactggagcgaagagccggcgctgttcccggtccagcagaatgcacagcttgccgccgaaaaagacggcaagcagatggtggtgggctttaccaccgtcgaaaccctcaagactgtggtcggtaccttgctgaacaagccgggtggctacatttccaacgaccgcttcccgcctggcctgtggatggacaacatgccgagctgggaatacggcgtgctggtgcaggtacgtgacctgacccgcgccctgcgcaaagactttgcccgctcccaatcgcaatcggccgaggatgcggatctggccaaggccgagccgcgcttcaacttcgacaacaagagctgggtgctgccgtccagcgaatcggaataccaggaaggcatcaattccctgagccgctatgaggcgcgcctgtccgacccgaaccagaagggcgcgctgttctatgcgcgggccgacaacctgaacaactggctgggcgacgtcgccacccgcctgggctcgctgtctcagcgcctgtcggccagtgtgggtcgcgtgaaactgaacaccgcgctgaaaaccgaagcgctggcgccgggtgaagtgccgcaggtcgatgaagaagtggtggaaaccccatggatgcagatcgacaacgtgttctacgaagcccgtggccaggcctgggccctgtcccacctgttgcgcgccatcgaagtggactttgccgacgtcctggccaagaagaacgccaccgtcagcgtgcgccagatcattcgtgagctggaagcctcgcaggaaccggtgtggagtcctatgattcttaacggcagtggcttcggtgtactggcgaaccattcgctggtgatggccaactatatttcccgggcaaacgctgcagtgatcgacttgcgtcagctcctcaaccagggttgatgatggacgctactcaaaaggaggccgcccaccgcgcggcttccgatgccgaactgatctgctgggtcgatgagcaggacactctgctcggcagtcttgtcagggccgatctgcgccagcgcgggttgatcggccgttgcacctttatcttcctgttcaattcggccggtgagctgtgtgtgcaccggcgcaccctgagcaaagccatgtaccccggtttctgggacacggcggcgggcgggatggtggctgcgggcgaatcctacgccgtgtcggcggctcgcgagctggaagaagaactgggcgtcggcggggtggaactggtcgaacatgaccatttctatttcgaagatggcgatagccggctctggtgcaaatcctactccgccatctgggacgggccactgcgcctgcagccggaggaggtgatggaagcgcgctttttacctatcgacaccgtcctgcaggaggctgagcaaaagccctactgcccagacgcccaggaaggcttgcgccgctatctggccttacgtcgctaaagttgcataaattggcgccatttggctcttagcaagtcggctttttgtggttacactgcgcgacttttcacccgaaccgccttggcggttcggtagcgctgcccctgcctgagtggggcttcgcggtcggtcatcctgatcgatcagtcttcatcctcccaagaggattgccggtggccaaaaaagccgcatccttcgccgcccttggtggcctggtattttccaccgacgcaggtcgacactgcccggactgtcgtcagcccgtggattcgtgtacctgcaaacagaccctgatccccgaaggcgacggtattgcccgcgtgcgccgcgagagcaaaggccgtggcggcaagacggtgaccaccatcaccggtgtgccgctggccgaagatgcgctgaaggaactcgccaccacgctgaaaaagcgttgtggcaccggtggcgcgttgaaagacggtgtcatcgagatccagggcgatcacgtcgagttgctgttggccgagctgatcaagctcgggtacaaggccaagaagtccggcggctgaaagcctcttcccgacctgtgtctaaactctgtcctgcgcgtggggtcctaccttgcacgcaggcaaatcgtcattttcattctttagactgcgccagcctcaaccaggggcggcgctttcgccttcatttataggggacttcgatgtccgtacgacgcacacgcaaagacgatggcagccaatggacagttgcggacagccgcagtgtttacgggattcgccattggggggccgggtatttcgcgatcaatgaagccggtcgcgtagaagtccgtccgaacggcccgaacagcacgcctgtcgacctgtacgagcaagtcgacgaactgcgcaagagcggcctgtcgttgccgctgctggtgcgcttccccgacatcctgcaagaccgtgtacgccaactgaccggtgctttcgattcgaacatcgagcgcctggaataccagagcaagtacaccgcgctgtacccgatcaaggtgaaccagcaggaagcggtgatcgaaaacatcattgccacccagaacgtgtccatcggcctggaagccggctccaagcccgagctgctggcggtattggccctggcgccgaagggcggcaccatcgtctgcaacggttacaaggaccgtgagttcatccgcctcgcgctgatgggccagaagctcggccacaacgtgttcatcgtgatcgagaaagaatccgaagttgagctggtgatcgaagaggccgccagcctcaaggtcaagccacaggttggcctgcgtgtgcgtttgtcgtcgctggcgtcgagcaagtgggcggacaccggtggcgagaaatccaaattcggtctgtcggcggcgcaactgctgtcggtggttgagcgcttccgtgcggccggcctggaccagggcatccgcctgctgcacttccacatgggctcgcagatcgccaacctggccgactaccagcacggtttcaaggaagccattcgttactacggcgaactgcgcaacctcggcctgccggtggaccacatcgacgtcggtggcggcctgggcgtggactacgacgggacgcactcgcgtaacgccagctccatcaactacgacatggatgactacgccggcgtggtcgtgggcatgctcaaggagttctgcgacgcgcagagcctgccgcacccgaacatcttttccgaaagcggccgttccctgaccgcccaccacgccatgctggtggtgcaggtcaccgacgtcgagaaacacaacgacgaaatcccgaccatcgaaaacaaggaagccctgccggaaaccgtgcagtggctggtggacctgctcggcccgaccgacatcgagatggtcaccgaaacctactggcgcgccacccactacatgagtgacgtggccacccagtatgccgacggcaaactgaccctggccgaaaaagccctggccgagcagtgctacttcgccgtatgccgccgcctgcacaactcgctcaaggcccgccagcgctcgcaccgccaggtgctggacgaactcaacgacaagctggccgacaagtacatctgcaacttctcggtgttccagagcctgccggacacctgggccatcggccaggtattgccgatcctgccgctgcaccgcctcgacgaagagccgctgcgccgcgccgtactgcaagacttgacctgcgactccgacggcaagatcaagcagtacgtcgacgagcagagcatcgagaccagcctgccggtgcacggcttgaacgaaggtgaagactacttgctggggatcttcctggtgggcgcctatcaagagattctcggtgatatgcacaacctgttcggtgataccgattcggtgaacatctaccagcgtgaagacggttcggtgtacagcgccggtatcgagacccacgacaccatcgaagacatgctgcgctacgtgcacttgtcgccggaggagttgatgacgcactaccgtgacaagtgtgcgagcgcgaagatcagcgccagtgagcgtacgcagttcctggatgcgttgcgcctgggcttgacccggtcttcctacctgtcctcgtaaaaaatgtgggagggggcttgcccccgatagcggtacatcagcaacacttaagttgcctgatccaccgccatcgggggcaagccccctcccacatttgacgcagtgctgatcctgaaattgtctgagggctgagcaatgttgagcaaatggccgcaagtgttcaccctggcagtggccgcattcttggccgcctgctcccccatcaaagtcctcaacgccctcaccccttccagcaccttcaccaagaccgcggccatcgcctacggcgctgatccgcgccagaaactcgatatctaccgtcccgctcccgccatcgccaacgcgcccgtcgttgtgtttttctacggtggcagctggaacagcggctccagggacgactacggtttcgtcggcgaagccctggcgtcacgcggtattgtcgtggtgattgccgactaccggctttatccccaagtgcgttaccccgcgtttctccaggatggcgctcaagcggtggcctggacccaccagcacatcgccgaatacggcgctgacccgcagcggctctatgtgatgggccacagctccggcgcctataacgcgtcgatgttggcgctggatgcgcgctggttgaatgcggtgggcttatcgcctgccattttcaaaggctggatcggactggccgggccgtatgattttctgcccattgaaaataaggacgtacggccggtgttcttcttccctgactcgccgcctgagtctcagccgatcaaccacgtcagtgccgatgcgccgccgagcctggtaatggcgtcaacggacgacaatctggtcaaccccacgcgcaatactggcggcttggctaataagttgcgcgcggccggcgtgccggtagaagcgttttacttctccaggaccaaccaccagacgctggtggcctccctgtccaggccgttgcgttggttggcgccggtgctggataaggtcacggcgtttatccaagccactgatcctgccggttcaagcgccaggcaatcgcccacaaagtaaggctgcgcagggccatgaacagcaggaagcttatccacaacccgtggttgccgaacccctgcaacgcccaggcaaatggcagcaggatcaccacggtcagcaacatgccattgcgcatttcccgtgcacgggtggcgccgatgaacagcccgtccagcaggtagctccacaccgcaatcaagggcaacacggccaggtagggcaggtagatatcggcggtctcgcgcacgctggggatatcggtctgcatggcaataaacaaatggccggcgaaggtgaacaacagggcaaagccgacgctggcaatcaacgaccaaccgcaagcgaccactaatgaacggcgcaaggcctggcggtcatgggcgccgatggcgtggccgcacaaggcttccaccgcatgggccaagccgtccagcgcatgggccgtcagcaacaggccgttgagcagcagtgcattagccgccacggtggcgtcgcccaggcgtgcgccttgcaccgtgatcatgaaaaacaccgattgcagcgcaaggctgcggatgaagatgtcgcggttcaccgccagcaacgggcgccagctctcccatagtttcagtgctgcccaggcgatatggccggggtaggcgcgcagggctttttgcgtcatcgccaggcccagcaaggcgccggtccattcggcgataacggacgcccgcgctgagccgaccaccccccaatccagacccagcacaaaccacaggttcagggcgatgttgaccagattggtggtcagcaggatcgccaacggcgcacgggcgttctgcgtgccgaggaaccagcccaccagtgcatagctggcaagggcggcaggcaggccgaacaggcgcgtgtggaagaagtcccgggtcagttgattgagttcgggtgagggttgcatccattccaatgccagatgactcagcggaatacccacggtgcccagcagcatggctaaccccagcgccagcagcaggccttgcaggaggatttgtcgcaacgcggccccatcattgcgcccggcagcttgtgctgcaaaaccggtggagcccatgcgcaggaaacccatggcccaggccaggaaggtatacaggctggccccgaccgccacggcgcccagttgatgggcgtggggcaggtggccgatgaccatgctgtcgaccagggccacaaggggcaccgagatattcgacaggatcatcggcgcggccagggcccagacgcggcggtgggtggggcggtggcgccagtcgatgagtagggtgggcatgggggctccttgggggagcggcattgtaacgggccctttatctcactgcagaaccaatgtgggagggggcaagctccctcccacctttggatctccagtgtttgtgggatttggctcgacattgcgtcccatcaagaaccaaagcaccctccgtcggtcaatgtgaccagcaccacatcggccccgtgcgggctgatatatagttcacccttcggacccctctcacaacgagtgccccatgtttaacaaaggattgttcctggcctgtgcgctggccctgctgagcgcctgcgattcctccgataaaccggcagccccgactgctccagccgcggcgacgattgcaccccagccggccaaggcggcggtcgacgtggcggcgctgaagcagcgctatgccgggcgtgagttgagtgtggtggacgtgtccgaagtgcagctcgatggggccagcaccctgtccgtgagcttttccattccgctggaccccgatcagaagttcgccgacaaactccacctggtggacagcaaatccggcaaggtcgatggcgcctgggaaatctccgacaacctgatggaactgcgcctgcgtcacctggagccgcagcgcaaattggtgctcaccgtcgatgccgggctgaaggcggtcaacggcaacacgctcgccaccgagtacggcgcccgcctggaaacccgcgacctgcaagccaccgtcggcttcgccagccgtggcaccttgctgccgacgcgcctggccgaagggttgccggtgatcgcgctgaacgtcgacaagatcgacgtcgaattcttccgcatcaagcccgaatccttgccgaccttcctcgcgcagtgggggcgcaacaccagcctgcagagttatgaatcccgcgaactgctgccgctggccgacctggtctacggcggtcgcttcgacctgaacccggcgcgcaacacccgcgaaaccctgttgctgccgatcgccggcctcaagcagttgcagcagccgggtgtgtacctggcggtaatgcgcgcctccggcacttataactattcccagccggccacgctattcaccttgagtgatatcggcctgtcggtgcaccgctacgccaatcgcctggatgtgtttacgcaggcgttggaaggcggcaaggcactggacggcgtcgaccttgaagtgctcgacgccgagggccgtgtggtcggccagggcaagaccgaaaagggcggccacgccgagttgccgttgccgaaaaaggcccaggtgttgctggccaagcagggcgagcagaccagcatgctgcgtctggacagcgccgcattggacctggccgagttcgacatcggcggtcagccttcccaccccttgcagttctttgtcttcggtccgcgtgacctgtatcgccccggcgaaaccgtgctgctcaacgccctgctgcgcgacaaggatggcaatgccgtcaaaccgcagccggtgagtgttgaagtgcgccgcccggatgaacaggtgagtcgcaaattcgtgtgggatgccgacgcctccggcctctatcaatatcaactgcaattggccggcgaagccccaaccgggcgctggcagctggtgttcgacctgggcgatggcaagccgcaactgtatgaattcctcgtcgaagacttcctgcccgagcgcctggcgctggaactcaagggcagcgataccccattgaacccggcggataacccggtgattcaagtgaccggacgctacctctatggtgcgccggcatcgggcaaccgggtcagtggacagatttatgtgcggccgttgcgcgaagcggtcaagtcgctgccgggctatcagttcggctccgtcactgaagaagagctgagccaggatttcgaactggacgaaagcgtgctcgacgccaagggccaggaagcgttgaccctggaaagcaaatgggccgaggctaagtcgccgctgcaactgatcgtgcaggccagcctgcacgagtcgggcgggcgaccgatcacccggcgcctggtgcagcctatctggccggccgagcaactgccgggcctgcgcggcttgtttgacggcaaggaaaccaacggcgatggcccggcggaattcgaagtgctgctggccaaccaggacgggcagaaactcgccgcgccaaacctcaaggtgcgcctggtgcgcgagcgccgcgactactactggaactactccgagagcgatggctggagctaccacttcaacgagaaattcctcaacctcgacgaacagaccctgaacatcaaggccggcgacacggccaaggtcagcttccagctggagtggggcccgtaccgcgtcgaggtggaagacccgcagaccggcctggtcagcagcctgcgcttctgggccggctaccaggcccaggacaacactgaaggcggcgccgtgcgccccgatcaggtcaagctggcgctggacaaaccggcgtatggcgacggcgataccgccaatgtcaccgtcaccccgcccgctgccggtaaaggctacctgctggtggagtccgccgaagggccgctgtggtggcaggaaatcgatgtaccggccgagggcaaaagctttgcggtgaaactcgacccgaaatggtcgcggcatgatttgtacgtcagtgccctggtgattcgcccgggcgagcgcaaagccaacatcacgcccaaacgtgccgtgggcctgctgcacctgccgttggatcgcacccagcgcaaactcggcgtgaccctcaccgcgccggaaaaaatgcgccccaaacagccgctgacggtgaaagtcgccgccaaaaacgccgatggcagtgtgccgaaacaggtgcatgtgctggtggctgcggtggacgtgggcatcttgaacattaccgaatacccgacgccggacccgtactccagcctgttcggccgcaaggcttacggcgtggaccagttcgatatctacggccagttgatcgaagccgggcaggggcgcttggccagcctggcattcggcggtgatgcggcgctggccaagggcggcaagcgcccggacaccagcgtgaccatcgttgccctgcaaagcgcgccggtgaccctgaacgagcagggcgagggcgaagtcagcgtcaatatccctgacttcaacggcgaactgcgcctgatggcccaggcctggaccgatgaccgctacggcatggccgaagccaagacggtgatcgccgcgccgttgattgccgagctgtcggcgccgcgcttcctggccggtggtgaccagaccacgttggcaatggacctgtccaacctgtcgggccaggcgcagaagctggatgtgcaactgagcgccgaagggcagttggagttggtcaacgctggcgcgcaaaccgtcgagttgaaacaaggccagcgcaccaccctgcgcatcccggtgaaagcctggggcggtctggggcagggcaaggtcaaggtcaccgtgaacgggctggacctgccgggtgaaaacctgccgccgttcacccgtgaatggacgttgggcgtacgcccggcgtacccggcactgctcaagcattaccgcgcggtgctcaaggatcagccgtggagcctgccggcggacacgctcgatcagttcgactcatcagggcgccaggcgctgttgagcctgtcgagccggccgccgcttaacctcggtgcgcagatcagtgcactcaaggcctacccttatggttgcctggagcagaccgcgagcggcctgtacccgtcgctgtatgccgacgatgcgctgctcaagcgcctgtcgatcaagggcgagtcggacagcgaacgtaaacgcaagatcgagctgggcatcgaacgcttgctaggcatgcagcgctacaacggcagcttcggtctgtggggcgccgatggcgaagaagaatactggctgacggcctacgtcaccgacttcctgttgcgtgcccgcgaccaaggctttgccgtaccgccgcaagccttgaagaaggccagcgagcgcctgctgcgttatgtgcaggaacgcaacctgatcgacgtcgactacagcgacaacgccgaccacacgcgcttcgccgtacaggcctacgccggcatggtgctggcgcgcagtcaacaggcgccattgggggcgctgcgcagtattttcgaacgacgcagcgatgcacgctccggcttgccgctggtgcagctggctatcgcactgcagaacatgggcgaccagccgcgtgccgaccaggccttgctcgcggggttggcgacgcagcgtaacgccaatgagtggctggccgactacggcagcccattgcgggaccaggcaatgatcctggccctgctggaagagaacgacctggccaagggcaagcgtgaggagcgcttgtttatcctctcggatcagttggcggccagcccgtacctgtcgacccaggagcgcaactcgctgttcctggccgggcgcctcgggtttgccaagccagaggcgaactggcaggtgtcgctgaccggcagtggcggcgtgcaggcattgagcaaccaacactcgacgctggaattggagggcaagctgctgtccagcgatctgaccttgagcaatcagggggacgcaccggtgtaccagcagctgacgatctcgggttatccacaggtgccaccggcagccggtggcgacaacctgagcatccgccgcgaatacctgggcatgaacggccagccgctgaacctgcgcaacctcaacagcggggagctggtactggtgcatctggcggtcagcgccaagcagcgtgtgccggatgccctggtggtggatttgctgccggccggcctggagctggaaaaccagaacctggcgcaaagcgccgccagcctggaaaacgccagcagccaggtgaaggaatggcgtgagtcgatgcagaacgcctcgctcaagcaccaggagttccgtgacgaccgctacgtggcggcgatcaacctggacggctccggcaccacacacctgctgtacttggcgcgggcggtgacgcccgggacttatcgtgtgccgccgccgcaggtggagtcgatgtaccggccaaattggcaggcggtgggggagacgccggcggatctggtgatcaagggacgttaatgtaaaacggggcctcaatgtgggagggggcttgcccccgatggcggtggatcagtcagcttatctgtagctgacccaccgctatcgggggcaagccccctcccacaggtgattttcggtgttttgggatcagtggacgacccagctcagaagccacaggcccagcagcagccagatgatgcccatgatgatcgacgcccgcatgaaggcgcgcaccgccgagtacagcagcatcaggccgacaatcagagtgaggatgctgatgatcgaggtgtccatgcccaaggtgcgggacaggccttcgacaaagttgccaccggcgtgggtcagcgcaccgaacaggccgctgagtccgtcgacgataaagcggatgatcgaaccgagcgcctggcccaaccattcgaaaaagctttctacctgcatgtgtgtgtcctgatgagaaggtgggcgtatctgtgcctttggttgttattgcaacaggctagttccctaccagcatagaggtttgcccgtttgagtttgcgtttagttgcccgctggaccctggccagccttttgttggtgatcgccctgctgtggctggccgatcgcatctggccgttgcccctgcccaaagatgacctggcgcgggtggtgctggccgaggatggcacgccgttgtggcggtttgccgatgccaacggtgtgtggcgctaccccgtgcagaccagcgaagtatctccgtattacctggatgcgctgctcacctatgaggaccgctggttctaccagcaccccggcgtgaatccgctggcactggtgcgggcgacgtggcagaacctgaccggtgcgcgggtggtgtcgggcggcagcaccttgtcgatgcaggtggcgcgcttgctggatccgcattcgcgcaccttccatggcaaattgcgccagttgtggcgcacggcacagctggaatggcacctgtccaaggaagaaatcctcaacctctacctgaatcgcgccccgtttggcggtacgttgcagggcgtggctgccgccagttgggcgtacctgggcaagtcgccgtcacagctgacccacgccgaagccgccttgctcgccgtgctgccccaggcgcccagccgcttgcgtccggaccgccacccccaacgcgcccaggacgcccgtgacaaagtgctgcgccgcctcgccgaattccatgtgtggccgcaagctgccgtcgatgaggccctggaagaaccgctcttgcttgccccgcgcctggaaccgagcctggcgcccttgctcgcacggcgcctgaaccgcccggacagcccgccgctgatccgcaccaccctggacgccaccctgcaacgtcgccttgaagacctgctgttgggctggcgcgcgcgtttgccggagcacacctcggccgcgatcctggtggtggaagaggaaaccatggccgtgcgggcctacctcggctcggtggatatcaacgacgtcaagcgcttcggccatgtggacatgatcagcgccctgcgttcgccgggctccaccttgaagcccttcctttatgggatggcgctggacgatgggctgatccactccgaatccctgctgcaggatgtgccccggcggtatggcgattaccggccgggcaacttctccatgggctttaccggtgcagtgccggcgagtacggcgctgtccagctcgctcaacctcccggcggtgcagttgctggaagcctacgggccgaagcgcttcgccgccgaaatgcgcatcggcggcgtgcctttggcattgccggcgttggccgagccgaacctggcgctgatcctgggcggtgcgggcagccgtcttgaagacctggtgagcggctacagtgccttcgctcgagacggcaaaagcgccacccttcgattgcaaccggacgacaccctcagagagcggccgttgctgtcgccaggctccgcctggattgtgcggcgcatcctcagcggccaggcgcgacccgaccgcgacccgcgtgccgagttggtgcagcgcccggtgctggcctggaagaccggcaccagctatggctttcgcgatgcctgggcgatcggtgtggggccgcgttacttgatcggcgtgtggatcggacgcccggacggcacgccggtgccgggccagttcggcctggcctccgccgcaccgttgatgttgcaggtgcacgatgtgctgaccaaccgcgacagccagcgcggtatcactgcaccggtcaagctggtgccggcaaatgtcggtgtggccgcgatctgttggccgctgggccagccgatgagccgcagcgatcccaactgccgccgccagcgctttgcctggacgctggacaacaccacgccacccactttgcaggcgttggaccagccgttgagcgtgggcttgatggaaagtgtgtgggtcaatgccaagggcttgcgggtggacgctcattgccctggcgccgagcccaggagtatcgccctgtggcccgcgcccctggagccttggctgcccagggccgaacgccgcgaagcgcgcattcccgcggccgaccctgattgcccgccaccggcgctggccgcgtcctcacctttatccatcgttggcgtacgtgaaggcgaccaactgcgcctgcccgctgccagccaacaggcgctgcgcctgaaaatctccgccctgggcggcagtggccggcgttggtggttccttaacggcgcgcccctgggcgacagcgccaaccaggactttatcaacgccagtttcgaacaacttgggcgttatcaactcagtgtcctcgacgaagccgggcagacggcgcgcatcgagttcagcgtcgttgattagatcgctatcgggggcaagccccctcccacactgggatgtgttggtctatcaaaggtgggagggggcttgcccccgaaggcggtctgaaggttcacttgccttcaaggccattccccccgaagctatccaccttcaggagcctgccgcatgaacctcgaacacctcaccgaacgcctgcaccgcatccgcgataccaaccactggaagccgttccacagcccgaaaaacctggccatggccgccagcgtggaaatggccgaactggtggaaatcttccaatggctgaccgaagaccagtcgcgccagctgccggccgacaaactcgcccatgccgggcaggaagtcggtgacatcgtgctgtacctgctcttgctgtgcagtgagctgggcctggacatgaacgaagtggtgcgcgccaaactggccgacagcgaacggcggtttgcccatgagtgaccgtcatttcgaccagttggccacgcgcttcgccgagaaaatctacggcggtgccaaaggcgcgatccgcctggcagtgctccaggccgacctcaccgaagccctgccaaagcgcccgctgcgtgtgctggatattggcgcgggcctgggccatatgtcgctgtggctggctgaacaaggccaccaggtgaccctggccgaaccggccgaaccgatgctcgaaggcgcccgccaacgtttcgccgaggcggggcagaccgcaacgtttatccatgcaccctggcaagacctgctcggccagctcaccgaaccctacgacctggtgctgtgccacgcggtgctggaatggctcgccgaaccccatgcgatcctgccggtgctgcaccaactcacggcgccgggtgggtggttgtccctggcgttctacaaccgcgatgcgctgatttatcgcaacctgctcaaaggccacttccgcaaaatgcgcaagaatgacatggccggcgaaaagcagagcctcacgccgcaacaaccgttggacccacgagaattggcggcgcaactcgaaggcctttggcaggtcgaaagccaaagtggcgtgcgggtgttccacgactatatgccggtggaattccaggcccgtgcggatttgcaggatcttttggagatggaactcgctcaccgtcgtcacccaagctttgccggacttgggcgttatttgcactggatctgccgtccggtttaagcggcccagtctgcggaggtcgaaatgcgtcgtctctgtttgatcctgttgtccctggggttgggcgcctgttcaagccccaatccttatgttgccgcgtcggcgccgatcccaccggcgccgccccaggcggcccacacctttgatgccagtgcctacccggcgccggtgcgcgattacggcgcctaccgcaattgggcctggcgcaacggccagcttccagcgggcacggcctgggccgattcggcgcagattgccgaagcggtcagcggcgccctcgaccagcgcggcctgcgccccttgcatgacaatcgcccggcggacctcttcgtcagcgccgacgtgtgcctggagaagcgtctcaagcaagtccaggatgactacggctacggttacggcggctacaaccgctatggcaatggctatggcatgtacaactcggtgccgatcgtgcgcacctatgaagtgcaggtcgtggtggtgcgcgtcaacctgttcgatgcccgcaccggccagccggtgtggagtgccagcgcagagacgggcagccagggcagcctcagtgagcggggagatgccttgcgccaggcggtgcagaaggcaatgacggcgtaccctcccagttaaccgctattctcatctttagcgcgggtcgctctttggagaacaaccatgtttcgtcgtatcgctacgctcgcttttgttgtgctgcttggcggttgccagaatgcccaggtcaaccacgattttgacgccagccgggatttcggcgcctaccgcagttgggcctggaaagacccggccctgcaatatcgccccgatgacccgcgcatcaagagcgacctcaccgaacagcgcatccgccaggccgtgggtgaacaactcgaccagcgcggcctgcgccctgcggcgcctggcaccagggctgacctgaacgtgcaggcctacctgatcgtcgaagaccgccagcaacaggtcaccaccaactacggcggcgcctggggcggcccgtggaatggctattggggcgcgccgatgtacaacgaaacgcgcaacatcacctacaaagtggcgaccatccagatcgacctgctcgatggcaaggacggcaaactggtctggcgcggcagcgacgaacagatgatggccacctcgcccaacccacaggaccgtgacaaagccatccgcaccaccgtcacccgcgtcctctccagctacccccctcactaacccctttaggcgcaggctcgccgtggtgagcaggcttgctttggccagcaggcttgctgtggcgagcaggcttgctgtggtgagcaggcttgccctgcgttgggctgcgaagcagccccctaaaaccgatttatggcaacgggccagcccttgtctacactcaaaaccatctacggagagtaagcgctaaggagtgcctgatgtctccccgacttggtgacaggcagcgtggtgcaattggcctgatggcggcggctaccctggcgatggccatggtgttcctgctgctggcggtagacagcggccgtctctacctggaaaagcgcaagctgcagtccgttgccgacagtgccgcgctggaagccgcaagccgtggcggcctgtgcacacccaccaccaccgccaatgactacgccgtgcagaacgccacacgcaacggcttcaccgtggtcgccggcgacaacagccgtggcctggccgtgacctgcggcacactgaccaccaatgccagcaatgtccgcgtgtttgcggccgatgccaccaaaaacgatgccgtccgcgtggtcgccacccgcagcgtgatgaccagcgtcgccagtgggctgtggaacatgttcagcggcgcgccgatgtctacccaaatggtgctgagtgccactgccgtggccgcctatgcaccgccggtggcgcaactgacgattcgcagcagtctggcctcggtgaactccggcaactccccgctattgaacatggtcatcggcaacctgttgggcggcagcctgtccctgaccgcagcgggctggaacggcttgctgacgacgaacgtcaatctgctcagttacctggaccagttggcgattcaattgaacgtcaaggcgggagactacgacgcgttgctgagcactgcggtatccgccagccagttgatcgacgcggcggtgaaggtcctgcaaaaaaacggcgcggtcgccacggcggtgatcaacgacgtgattacagtgaaagccatcgccccgaatacccagctgttgaaggtgggcgatctgttgaaggtcgctaccggtacaccagcggctgccttgaataccagtgtgcagttgtttcagttgctggagaccgtggcgcagctatccagtagcaaaagtgcggtcagtgcggcagcgcaggtgaatattcctctggttggcaccgtctcggtccagaccaaagtcatcgaaccgccgcaactgtctgcgtttggcaatccggccaaggccaaggctgggctgttgaataatccgccgacggaccagatttttgtacgaactgcccaggtacgcacgttggtcaccatcgatgcacccatcatcaaggtggtctctggggtttcctcgatactgaccgggctggcgacgcccgtgtcgaaggtggtcggcggtttgttgaacctgaacctgctcgatgtggtggccggtgtcgtgtgcatagtcgggtgcaatgtggctgatgtggatatcaccacgaccctgtccatctatatcgaggcggccagtgcagagagccacgtgacagacttcagttgcgccaccccggccaccaagtcgttgacggtgcaggccaccacctcactcgctaccttgggcgtcggctacgttgacccggtgtcggcgttttcatcgtccttgcctgtcaatgtgcagccggtgcggctgatcgactttggccaacgcttttgcctgctgaccctggtgtgcgggccacgcaccgccggtgttggcggtggcttgaacctgagggcgttgtccaccgtgggggcgcaaaccaatacggtgttgttttcgccggtgaatgacatcaatgcggcgacgatctacaaaagcccacccggcaccgccaatatcgttaacagcctgggggctaccttgagcggcttgcaggtgacctatgtcccacctaccggaagcacgcccggtgcgccgaacagcacagtcaccagtgcactggcgaccatcgtcaactcggtggtcagcctggtccagaacgtcctggcgccgatcctcgaccctatcgtcaacacgctgctcgcagccctgggtgtcaacctcggcaatgccgaagtcggcgccaacctcagttgccacatgggccgcgcctacctggtgatctagctgatcggcaactccacacaaaacttcgcgccgtgctcaccattggcgacgctcaggcgtccgcccatgttttccacaatcccataactcaccgacaaccccagcccggtgcccacgccaatcggcttggtggtgaagaacggttcgaaaatccgctccagcagccgtgggtcaatcccgccgccgttgtcttccacccagatccgcacatggcggctgtcgtgctcgcaatgcaccgcgatccagggacgaaattcgggatgtttaccccgtttgctcaacagcgcgtcacgggcattgaccatcaggttgatcaacacctgttcaagctggtcgacatagcctttgacctggacctggaagtccgccggggtgatccgcacctccacccccttgccgcgcagaccctcgccgagcagtgacagcgtgccgtccaccgcctgcgacgggtcgaaaggcagttgttcgatttccgagcggcggccgaacacccgcatatggtccaccacccgcgtggcgcgctgcacctgggcatcgatgcgctggagtttttcgatgaggtagtcgatctgtgcatcgccattgcccagacgcttgagcacattgacgatggccatgcgcatcacgttcagcggctggttgatttcatgggccaggccggtggccatttcacccagggtggccatcttggcgctttgcgtcagttgctgctgggagcggcgtacttcggtgttgtcacggcccaccgcctgcacttccaccagcgtgccctgttcatcgaacacaccacggtccgaccagacccaccaggcgtgttcgcgtccaggcaattccaggctgatttcggcggtgctgaccgggaattccggggttaactgttcgatgcgttgcacaaaggcctggcgttgttcgtccgacagccagtgccccaggttcagccccggcaattgcgcgggcaggcattccaggtagttggccagcggtgtgttgccgaaggtcagggtcaggtcggggcgatagcggcagatcatcgccggggagtcttcgaccaggatgcggtagcgttcttcgctctgcctgatttgctcggcggccagggttgcctcggtgacatccagccacaggccgacggcttccaccggcaggccgaggtcatcgcgcagcaacttggcttcgtccagcaaccagtggtagtggccctgtttgtcgcgcaggcggtagcgactgcgtacgctgccttcacgtagtaattggcggctgcgctcgaagtacagctcgcggtcttcggggtggatcaaggacgccaggctttcgtggttgcactcggccaaggtccagcccagcagcggtagcaggctgtcgctgaaaaaggccggatgcagggcgccgtcgacatagcgctgcacatagatcacggccggtgagctggcgatcaggttgtccaggcgcgcatgggcggcggcggcttgcagttgctggttcttgatgtcgctgatgtcgagcatgaaaccgatccagcggcggctgtcgcccacgcccagcacctggccctgcacgcgataccagagcgggtggtgctcggcgtcggtgcgttgcaggcgcacgctggtcagcaagggtttgcccagggcctgcaggtcgtgcagacggctgtcgagggcctggcgatcggccgggtggatcagttccagccactggctcaggggttggcgggtaggaccgtcttccaggctgaggctgtgcagcaactgcggggccagctggatttcctgggtggccggcagcagctcccaccagccggtgccgagcaggccctgcaacgcctccatacggtcgagctgctggtgatagcgctgctcgcgcagccggctcagcaggggcgcggcgagggcggcggcaaggttgagccagtcgcggtcgcgggtgtgttgctggccgttgtattggccacagagcaaccaggcggcgacgccctgactgtcgcggtagggcaccaggaaaccgtcggcatcgccgaagatactgtgcaggcgtgggttatcgctgcgctcctgggccaggctcaacggtgcattgccattgacgctgtccaggctgatccccaggtgttggccggcctgccacaaggcgggggcgtcgtgggcggcgtactggctgtagatccgccagccgtggtcttcgtcatcgagcaaggccagggcaacgcaggggatgtgccagcgctgggccaggctgcgcaggtgctcgttgaacacctcgggcaggcgggccaggctgcacacccgcaattgctcgctcatctggcaggcgagttgatggttctgttcgcggtgctgggccagttgccggccggcgagcaaatcgccaacgtcctgcaggcgcaggctccaggcatcaccgtcgggttcgatccagccgcgggtatgcagcacctggccggttgcggcctggaagtccaggtccaggccctggtgttgccagtcggcggggctgccttcgatagtcaaggcgctgctggcgcacagcagttcatgcagtggtggccggcgctcgccgatggcgtgcatcgcgagctgtgggcgcaggctgccactgatgctcagcacgtggcctagagcatccaattgcacctgcagccctggcaggggcacacccggcatgtcgaggggcggcgcgctggcgcgaccgagcaggcgcccgaagagtttgtcccccgacgtcaaaactgcagactcgaactggcggagaggttggccggcaggttcgggacggtgccgatccccggcagcaccagtgccgggaacacggaatacaggttggtagtggggtagttgatcgccacggtcaacgtggtgccgttgtaggtgctgctgatgtaactgggggagaactggaagctggaagggatccagctcaactgggtgatcacggtgtttttggcgcggtcggtcacctgcgtcccgtacgcggtgccggcggctatcgggtccaccgacagggcctggcgcacggcctccgccgccgcctggttgaacgactgcatcaacagcaacggcaggctatagctgatcaacccgtagaacacggcaaaaaagatcgcgaagaccagggcgaactcaatcgccgccgcacctttttgctttccaggcaggcctgttttcatgactgcgtctaccctgacggctactacttgatatcagcatagaatcattcagcgaaaagggatgttttttacgtgatccatggcgtggtgattctgctctggctggggctctgtgcgttgcaggatatgcgtcagcggcaaattgccaatggcctgaccctgggggcggcgctgctggcgctgatcttcttgctgtggacgggcacgacctggctcggagcgcccgccagcgagggcggcagggccttcgccctggccttgctgctgaccttgcccggctatgcgctgggccgctttggcgcgggggatgtgaagctgctggctgcgctggccctggccagtacgctggactatttgctgtggtcgttgatcggtgcggcgctgtttcaggcgtgctgggtgcttgtgagtcaaaggcttagggcgcgtcgggggaggacagatgtgcaggtgtcaaccaaacagccctttgccccctttgttttgacaggatttgtgctgtgctggctttggatccattagtcgaacaaccgctctgccgctatgtacatagtcggaaagtgcgtctacgtttatgtagtatccggatgttttttttgtccaaatggatggggcgccctttggcttgccaggcatggagtagcgcgtgaacaagcttacctcggcggtaaaagtgctcgtggtcgacgatcagccgttgatcgtggaagagctctgcgaatttcttgaaggcagcggttaccgctgcgtcccctgtgagtccagccgacacgctttgcagcgcttcagcgaagacctcgagatcggcctagtgctgtgcgacctgcatatgccggacatggatggcatcgaactggtgcaggccatgcagaaggtcgcgggcaagcagcgcgcgttcgaggccatcatgctcaccgggcgtgccgacaaacaggacgtgatcaaggccctgcgcgcggggatctcggattactaccagaagccgatcaacctcgatgagttgctcgaaggcctgcaacgccaggaagcggcgctggaggagcggcaaaaggagctgcacctggggcacctgaaccagaagctgcaatacctttccgaatccatcaacgatttgtaccaggacctcgacaaagtgcggcgcagtcctggcgccggcttggcggatgagggcgagccggtcgtcgatgatgccgggccgatcgaaatcccgaccatcttcaaccagctgtcgccgcgccagctcgatgttgcgcgcctggtgggcaagggccagaccaactaccagatcgcctgtgaactggggatcaccgaaaacaccgtcaagctgtacgtgtcccaggtgctgcgcctcacccatatgcataaccgtacccagctggcactggccctgtcgccggctacctcggcgctgcggcaacgggtgacggcgcactgacggttactgactcctcccacccttggacgacccgccggattgcgactcgaagaactccggaattggatgtttgttgctgtccaaccaacgctgcaaggcctgctctcgttctgcgggcgtggtccgttgtggcgtggcggaagctgcgcgcccatcgacctgcaaggccatccagttttcggtctccgcctggtagggggacgatgggccaggttcgatggccagtgcgctcaggggtagcagcgccagtgcgatgaagtagtgtgctttcatcttgctctccttacttgagggtcaccggcagggtttcgctgaccgctgcgactttgcgtgtcgccacgccggaggccttgagtttctccgcgcgggcctgggcctcggtgaactgttcgcggctcaggcccaactggctgacaaccttggccgcttgcccccagtcattctggtaaatcaacagcgtgaccaggttgacggccgccagcgggtcgccttgcttgagttcgatggcggtcatgaattcaaagcgggcgtcttccacccgtagttggttgaggtacaccacgcccaagtcattgcggatcttttcgtcagtgggtgccagctgcgcagcccgttgcaagtgagtcatggccaggccgttgttgcccctggcggccgccaattgcccgaggccgtgctcgccttcggccgtcatgcaggtgccgagcaggctgcggtacaacggctcggcttcgctgcgcccgagcaggcgataagtgcgggctttgcgctggcgcacctggggcagtgactcgggcaggttttgcaggttggccaggctggcgtgcagcttgccttcgttggccaggtcatcggacaggttcagcgccagctcctggtccgcgctcggcttggcgcaactgccgggtgaggtcagtgccgcccagggtgattggccgttggtggcgcagccgccgagcatcaacagtgtcaggccggcaatcagtgctttcatcaaggtctcctcaaaagtggctcaacgcgcgggcgatgccgataaaggccgggccgccgagcacgatcaacaaagcggggaacagaaacaccatcatcaccaccgacatttttgccgacatcttcgagatgtattcctgcaagcgggtcaggcgtcggtcgtcgagcagttgcttgagggccagcagggacttcatcgcgccgccaccctgctggatcaattgctggaggatgatgcaggtgtcggtgaactcatctacctccagcaggcgcgcggtcttgcccagttcctcgctcagctccagcccggaatcgacccgtgccaggatcagacgcagttcatgggtcagtgcaggcagcaggcgctgcgcttcgttgcccaccacccgcagcgactgttcaatcgccatgccggattcgaacaggatgcgcagcagtggaatgaaggttgaaatttccttggcgatggtctgctggcgatacttggccgcagcggcgagcacacgtttgggcagcaggtagccgatgcacagggcaaacatcggcgcaatccatgcggggtccgcgtgtgggaacagtatctgctggccaagcaaggtgagacccagcagcacaatcggtgtaccgacctggaaggcggcgaacagcgaacgctggctggccttgcgccaacccacgcggttcagcagggtctgggtctcgttgtccaggctgaccgaacgctgtgccaggctgctgccgcccagttggcggatgagcgtggcgagtttgtcatcagtgcccatccgcccctgcaagcgctccgtgaccctgcgctcgcgccgccggttttcgagcaactggccacccaccaggacggcggcggcgagcaacaacaaggcgaaggccagcagtgccatctcaaacactcctcagcatgcgccacatggccagggtcccggccatgtccatcgccaatgccacgaagagcagggtgcgcccggtgccgtcgttccacatggtcatcaagtattgcgggttgaccatcatgaagtagcccacgatcaggatgggcagcccgcccagcacataagcggtcatgcgcgtttcaccggtcatggccttgagttgcctcgcgccttgttcgcgctcgcggatcatcttgatcaggttttccagcagttcgctggcgttgccgccgtagcggtggttgaccttcaggccgagggcgaacaggcggaattcgtcctgctcgtagaactcggcaaagtcgctcaccgagtccggcaggctgacccccatgcgcacgttgcgctgcacgcgggccatggcgtccttgagtgggttttcaacgccctcgacgccgcccagtaccgcgtccgccagggttctgccggacttgaggctgcgtacgctatggtcgagcaactgcggcagttgctcgaccatgcgctgcacgcgccgttgataacgccagctgatgtacacgcgcagtaccaggggcggcgccacgaccatcgcgatcagccccagaccgtcggccagcagccagccgaacagcgcgcctatcacccaggcgctcagccacaggcccaggcggtcggtgggcttgcccagcccggcgcgctggaacatgcgctcaaggccgctccacttggtattcggctcctgggtgtcgggctggccttcgccgaggcgctccaacacgcggtctgtctgggctttgcgcaggccatgctgaaactgccagaacgacaggccgatcaacagcaggcagacaagcagcaacaccggtcctgtcatcacgcgctccctagggctgcaacgccgattcgcggcgcagtttgtcgccggccgggttgagggcttcgcgcaggaagccaaagccggtacgccggtccaggcggaacagggtattggtgacgtacacgtcatcacgcacaccgaccacttccaccacttcgctcacgcagcgacgcccatcgggcatgcgcgtcagttggatgatcacgtccagtgcggcgcagatcatctggcgcagggttttttcggcgattacccgcccggtcagacccaccagggtttccaggcgcagcaacgcatcctgggcgttgttggcgtgcacggtgctcatggagccgtcgtggccggtgttcatcgccgtcatcacgtcgagcacttcgacaccacggatctcgccaaggatgatgcggtccgggcgcatccgcagggcgttgcggatcaggtcgctggacttgacttcgccgtggccctcggcgttcggcggacgggtttccaggcgtaccacgtggggatggcccagttgcaattcggcgacgtcttcgatggtcaccaggcgctcgtgggggttgatcagctggctgaggatattcagcaacgtggttttgccggtgccggtaccgccgctgatcaggatattgcagcgcttgcccacggcctcttggaagaactcgaaaatgctctggtcgatggtctgcatggcgaccaggtcactactcttgagcatgtccttgcggaattttcggatcgacaggcacggcccatccagggcaatcggcgggatgatcgcattgactcggctgccatcgggcaggcgtgcatccaccatcggcgaagactcgtccaggcgccggcccagcggtgcgaggatgcgttgcatcacgcgctccacgtggtggtcgtcgatgaagcgcaggtcgctctggtgcagcagcccatcacgctcgatgaatacccgatggggcccgttgaccaggatctcggtcaccgaagggtcacgcaacagcacctccagcgggccgaaaccggtgagttcgtcgacgatctcttcggccaggcgctccgtttcatagcgcgagatcgccaggcgcatgcgcgtgatgtactcggagactttgtcgacgacgaattgcgccagggactggcgcgtgccttcgagcaggttcttgcccgactcctcgatggcgtcgatgatgtagcgatgcagcaccagtttcaggccatcgtgatctgtgttgccaccggcagcgcgggctgggccgccaaacagtttttcgccgctcatcgtccggaccccaggaagcgttcaaaccagcgcatcgagggctttgccaaaccctcggagcgttttgccaggcgctcgcccaaggcacgtacggcctgggtcaagggttcgcgtggcgccagggcgaacagggtctgaccctggtttttcacattcaggcgcaattcggcgctcaggggcagcacggcgacgcattcgaggccgaagctcttttccagggcttcggtgtccggcgcgcaggctttgatatagcggtccaccaccagcttggcgtgatcgagcttcatgcctttctcgcgccagcggttgatcactgccaggttgcggcggcagtccagcacgttctgatcggtacaccacagcagtttgtcgcaatggccgacaaaggtgcgcagggcttcgctgtccggctgaccggtaatgttcacgacgatgtgctggaagtgttggcgcaaggcgctgagcaacatgtacagctcggcggcgctggtgagtttgagcggttcgtcaccggtggcgtacgccaggatgcgcaggccatccagggcggtggtgaacgcgctgttgatcatggtggtgtcgaggcggcgcagatgccgcagcgcatcgccgaaattgaacgtgctctccaggcccagcagcgccaggctgtcgctgcgtggcaggcccaggtcgagcagcagggtctgctgcccgctcttctgcaccaccagcgccaggtgggtggccaacatcgccccatcggcgttgctctgggtgccgaacagtacggtcaggccacccagttgggcgttggatgtcacggtcggcaggcgcttgctcaggcgccgcaccaggccggccacttcgctggagcgtgagccgtaggcgacaaaatcccgagcgccggcacgcatggcattcagcacaagctggttgtccatgccatcgcccagggcgaccacggcgagcatcggcttggcttccagggcgccttcgatcagtgcgctctgggccaccaggttttcgcggtccaggccgatgaacaccaggttggcgaaggtcacgtcggccagtgccagcagttcgtcgaggctgccggtgccggcgctcaccacttggccaagcggtgcaagggctccctgcagccactcaaggtcggtggtgttgcgggtgatggcgaggaaggtctggctcaggctatcgctcattgggaaagtccactgcgacgatcgaagttgccgttttccaggaaaaacagccggtaccagttcgggtcgtagctgcgcagtttttcgcccggcaaggacggcagttgggcgttggcggccaacggttgcaccaggtgcggcgtgacgatcatcagcagttctttttcttcgcggctgatcgtggagtcgcggaagaacgcgccgaggatcgggatatcgcccagccccgggaatttgtcgatggtcgagcggttgttggtgctgatcaggccgctgatcacaaagctttcgccatcggccagggacacgctggtgtcggtgcggcgtacggtcagggccggcacctggatgccttggatctgcaccgcgttgctgtagtcgagctcgctgacttccggcgccaccttgagggtgatgcggttgcggtcgatcaccgtgggtgtcagcgtcaggcggatgccgaactccttgtactcgatagaaatggtgtcgctgccggagctgggcaccgggatgggcacctcaccgccggccaggaaggacgcgctctgcccgctcatggccaccaggcttgggcgtgccagggtgtaggcaaagccgctgcgctccagggcgttgatcatggccttgacccggccaccaccaaaaccgacgttgaagctgtccgtgctcaccggcagtttgaacacgccttccgagggggacaggatgttggggctgccgaggaaaaagtttgcacccgtgcccaacagcttggtgctggcttccttgagcttgctgcgactgacttccacgaagcggatatcggtctgcacctggctgggcagcaacgggtcttgcgagggcgacagcgacacgctggtcagcgccgaggtggccttgcccttgacgaacaccatgctctggcgcggcgcgctggcgcaggcggtccacaccagcaggctggtggcgccgctgctgacaccggtgagcagaaagttacggtcgccgttgacccgcacatcggcgatcttcgggtcaccgatggcaaggcgcgtgattgccacgggtgattgcagttcctgctgcaggccttctcccacctcgaccacggcgggcaactggcccagggcgctgcaattacccggcgctgccagagccatgccgatcggcaggctcgacagcgtcaaggcgcaggccagctgcgtgaacatgggtgcgtagcgatggctcattcaaggcatccttgttcgatcacggggtttgtggcgccgcttgggcgccgcgaatcacttcgatgccacggcgcacgccaggcccaccgccaaccggcgcgacgcgtttgggcgggccggtcaatgccagttgagtgaattggtaaaggtcgcggttggcactttccagcttctgcgcggtgtcatcttcaccggcccagtagcggctgagcagttgctcctcggcactgcgcacggccaggcgcaaggtcccggcttgcgccgcgagcatcaggcggcttaataaaggctccggcacggccagcaccacggtgcgtgcggcgaggcggcgttgtagggcctgggcgcgttcttcggcggtcgctggcggtggcactgccggctggccatcgttggccaggcccaattgatcgccgacgctgagcagacgcatggccggcaggacgatctgggccgactgttcggcgttgccggcatcctggcgcaggaacagcagcacatccacgtaatcgccggggctcaactggcctgcggcgccgaccacctcgtccacggccacggccagcgcgcgctcgttggggcggatcatgcgcgagagggggccaccggcgttgaaactgtcctcgttgagccaggtaccggcgccgagggctctcagggggatacggccgatggcctggtcgagctgggtcaggctgccggcgggcgcggtgcgcagtttctcgacggacaggtcggcggcggtcagtggcgtaaaggcaggcacctcatgccgcaagacaactaccggctggcgggtttggtcttcagcggcggcgagggttttttcaacggaaacgacaggtgcggcaggcgctacgacgggctcgggtgtgcggctcaacacaagtccccagtacccggcaatcaatgccccgatcagcaacaagccggccaggaccatgctgatgcgactgttcatgacggctctccctttcccgttgcactgcacaccctgttaatccaaacgggttaatccgcaacctggctgtgatgaacatctaacgatttggctatttgaaggtagctcagctaggacgaaatgccattaccgctggaaaaaattatctggcgtataaagttggccttttaaattgcagtgttgtggcgtcaactttgcgactaatactttgtgattaatccgttcttacagttgtgaggccgaggtttgttgacaatgctctaatggcacgccgcgatcatctggtggtagagcctttccggctttcagtggcgttttagggagaagtccaatgttccttgacatgatgttgaagctgtatgtccaaacccaacttttctttcaacgcaaagacggcgcgtccgggattgagtacgcgatcattgtggccatggttgcattggtgatcgtcggtgccggttctgggcttggaactaagatcaaatcgatcttcgacagcgtcgccactaagatgaccacttgatagcctgcttatccatgtggaaacgccttattaacgttcttcctgtccaggtacagctatgagcgcctcttcgccttgccgccaacaaattcttttggtggatgacgaagaggacgccttgatcgaactcgccgaatccctcgaaaacgaagggtttgtgtgtttcactgccaattctgtcacgttcgccctgcaagaattgacacttcaccccgacattgccctggtcatcaccgacctgcgcatgcccgaggaaagtggcatttccttgatcaagcgcctgcgcgaacacacctcacgctcccacctgccagtgattgtgatgtcgggtcatgccgaaatggatgatgtgagcgacatgctgcgcctgcaggtgctggacctgtttcgcaagccgatctacctggtgcggttgatcgatacgttgaacaacctttttcctctgcccaaaacggtgtagtgagctggcctggtaaaagcgggagtgctgcgcactccaacgcggggcaagcccgctcaccacattagagctggtagctgaagctcagcgaatagcgcggtcgacgatcgaagctgtccagggcttcgtccgacatcggcttggcggcttccagcgcgatgttgtagtacttggcgtcgccaaagcgcaggcccagcgccgccgatgacaggtcattgcccttgaccggcaggtcgttgaaccaggtcttggcgcggtcgaacaccacatagggttgcaggatcctcacccaatcaccggcgcggttgtagctgtagttgacctcgtatgccacgccccagcctttgtcgcccgtgccttggtcatcggggtagccgcggccgaaactctgcccgccgaaggtggcgcgctcgctgtccggcaggtagtcgttgctccagtagagcgcgccggacagcacgccttgccaattgccgaacagcttgttgctctgcacgccagacaggcgcaggcggaagaagtcgaggtcgggcttgaggccgccgaagtcggtgcgtgtcttggcacccatgccgttgatgccttggtagaggccgccgctgatgatgcgcaactgcgtgggatccgctttgcgccagtcgccctcgaaggccagggcgcgcaggttggtttccagctcgaaacgctgagggaaaccgctgagcttgtaccgggtggtctggtcgacggcgtagaggcgggcgccgaggttcagcgattcgctgggcgaggcgataaaagggtggctgaggccaaaggagtaacggtcgatttcctggtgcggcttgagttccaggccatcgcccagttgcaggctggtgcttgggtcggcgcggtagcgttcgcccgagagcgccagttgggtgccttcggcattgaggaactggctataggtcgcgcggtagtagtgctctttatcctggcccggcggaaacaggccactgatgctcagttgctcgcccatggaggtccacgaattgctggtgccggtcagcagcgcctgggtgccgccacggctggcctggttgaggctcatgctggtggtgacgggcttgcggctggcggtgacttgcatatgagtgccgccatcggtggtgctggggggcggcacttgagcctgcacggtcaggccagggatcgcactcatcagcgtggtgtagcgttcgaaggtcttgcgcgtgagcgggcgttcggcctggagttttcccgccagtttgtcgacataggaggagactgatccgatgtcgccttgcaactggtaatcgcggatgtagccctccaccagcaccacctgtaccaggccgttttcgaagtgctgttccggcaggaaggcgtaggacagcaagtagccgtcttcctggtagcgccgggtgatgctgcgggtggcttcgatcaattgcgccaggttggtttcatggccgatcagcggcgcgaatgcctgggcgacgtccttgagcgggtagacggtgccgccgtcgatctgcagtttgcgaatggtgaccttggtgtccatcatcagcggctgcccggcggtgggcgccggtgttggcacctgggtgggcgtgccggtaggccggtaggcgtcgacgggcagattgggcacgggcaggttgcggatggtgtcgttgctattgaggaaagtgggaagggtatcggcgtgggcgtaagcactgagggtgagcaataacaacggcgtcaaagcgcgcataggacactccatggtcaaaactgcagcagcgtttcgcagattcccgccgggctctgggggcgcggttcgggtgtctccaggggtcgatcattgacccaaaaaaaagacgagagacttagtggggtctctcgtctcaaccaagcgtaggcgctgtaggtgaggccgtctaatcggccaggtgcaattctattttgtgccgctcaggccacccaacagcccgccgagaacaccaccgtttgcattggcgccggcccccgcgcccgccgaggcaccggcacccacattgagaccgccgccgagcaagccgccaccggtgttggtgccgccggtgaccaggccgccgatcgacgccacggtgccacccactgcggtcacggtgccgcccagggcattggtgaccgggttggcgttggtggcgctgatttgcccgcccaggctgctgaccgcgccaccgacattagtgaccaggccattcaccgggccacccaggccggtggcgttgccgacgttttgcgtcaagctttgcacgccgctggtgacggggttcagtgcgccgccgatctggctggtcagccctgcaatgggggcgcctgccgccatgtttggagcgccgctgccgccgaggagggtacccagggaggccacggtggtgccggctttgacaccggtgacgccggtcgcgctgaccacgccattactgctgcctgcatccaggccgccaccggcaccggcaatcacgccaccgatcagttcaggcaaacccaaccggttgatgctgccgcctgtaccgccgccgctgttgccaccgttgttgccttcatttgggtcgacataaccgccagccttgctcaccacggtgccgacgccattgagcacattgcccaccgcacccgtcactgggttgccagtgccacctgcgccggcgacgttatcgcccaggccgtcgacggtatcgccaactttttgcagcaggccgcccacaggcttatcaagaccggtcgcggtgccgactttacccgtggtgttttccaccagggataccaccggtaccagcactctcgcgccgacggtgttggtcaccgagcccagtgggccggtggtgctggcggtgctcagggtgtcgcccagcatggtcacggcattgccgaccttgccgacgacgttgccgactaccggggctgcgccgctgacgaccggcactttacccagcagggtggcgacgttgctaccggtgacggtcacgccatcgcccaggtcggaaaccccattggccacgccggcgacggttttgcccaaggcattgctgtccgtgccaagcgagcccaggccatccgacaggccggtgccgatgctgccgaccgcgttgccggtggcattcaccaggccgcccgcagtggcgccaacgatgggcaggctgccaagggtggtgcccaggctcctgacggtgccgccgaggtcggtcacggtattaccgagggtgtcgaccacggtggcggtgaccaagggggtcgtgctgccgcctgggttggtgccaggatcggtgccggggttggtccctgggtcggtgccgccgcctgtcccgccacctgcacccgcacccgaggaggacccaccgctgtgatgcccgccaccaccgctgctgcagccgccgagtgccagtgctactgccagggccagcgcggtacttgctttccaaaacacgacttgagttttcatgattgagttccttgcacctgtacaaccttggttgtcttcaaacgctcgctacttctggggatagcgatgcgtttgtccgtgtggctatagcagccccggcggtgcgttctctcaatgctctacttggtattaacgatttatatacagcagcggtgtaccggttaagcaactaatgccaagggtataagggaaggatgtatcaagatgtatatatgttataaatcaattggttaaataaaaaaagcggacttcatgaagtccgctattacttagtgtgtatatatacaattaacctgtttgtttcaggcgatcggccgccacttgcctaccatatgttcaatatcgcccgcgcctttcaaccacaacgctccgctggaaccggcggcgctggccaataacgtcacttcaccgggcaggcgcacgggtttcctgaactcgacgtcgatctcgatattggcggcgggcaagtgttcgccgagcgcggcgagggtgtgcgccttgttccacagcccatgggcgatggcctgggggaagccgaacagcttggcggtcagggcgctgaggtggatcgggttgtaatcaccggagactcgcgcataacgacggccgatatcggcgggggctttccagcgggtcagctcgctgacctgggcgggagacggttgggtgatagcttctgtctcgccttccagcttcacgccccggcacagcatgcggctgtcggcttcccacagcaggccgagggaatcctcaaccgtggtgatcagatcgaaggttgcacccttggggtggggtttgaggttctgcgcgtgtacagccacgaaaaggtcgctcacaccccccaaggggcgatgaatgcggatgcggttactcaggtgaatcagccccagcagcgggaagggaaaacgtttatcggtgagcaactgcatctgcaggccgaacgccaggatatgcggatacgtcgccggcaggattgggccgtcggcaaagccgcagaccttgcgataggccgtcacccgctgggcatcgatgctgacccggcagcgcaacccgaactcgggcaatgtactgccggtgattttgcgcttgagggctgcgcgccaatacagcggcggcagagacggtgctgtgtctaacgtcttccattgcatgctcacgctcccaacagactttgcccacacacctgcaacgcttgcccgctgatcgcaccggagcccggttggcccagccaggccaccgcttcggcgacatcctgcggcaggccgccctggcccagcgaactcatgcgtcgcccggcctcgcgcaaggcgaacgggatatgcgcggtcatctgggtttcgataaaccccggcgccacggcattgatactgatgccgcgcgccttgagcagcggcgcccaggcctgtgcgaggccgatcaagccggccttgctcgccgcgtagttggtttgcccacggttgccggcgatgccgctgatcgacgccagcagcaccacgcgggcgttgtcatgcagggtgccgctgtcgagcagcgccttggtcagtacctgcggcgcattgaggttgacggccagcaccgcgtcccagtattccggggtcatgttcgccagggttttgtcacgggtgatacccgcgttgtgcaccaggatatccaggccatcgggcaggtgttcgatcaattgggtggcggcgtcttcggcgcagatatccagcgccacggtgcgtgcacccaggcgtgcggccagggcatcgaggtcggccttggcctggggcacgtcgagcaggatcacctcggcgccgtcgcgggcgagggtttcggcgatggatgcgccaatgccacgggcggcaccggtgaccagcgccttgcgcccggccaggggccgtgtccaatcttcgaccggcgtggcgcaggcctccaggcggatcacctggccggagatataggcgcttttcggcgagaggaagaaacgcagggcgccttccaactggtcttcggcaccgtcgccgacatacagcaattgcagcaccccgccgttgcgcagctctttggccagcgagcggctgaagccttccagggcgcgctgggcactggcagcgaacggatcgccgaggttttccggcgcacggccgaggatcaccaggtgcgcactgttatccaggtttttcagtagcggttggaagaactcgcgcaattgcttgagctgatcggtgtgttgcaagtcgctggcgtcgaacactacggccttgagcttggggccgtggccggggatccacgtcgacgtctctgcgccgtaggtgtagatcgcgtcggtgagcttgttggcgaacgcctgcaccttgctgaccagtgcaccgccgcccagcagcaatgcgccttccaccgggcgcaggcgcccggcttgccagcgttccaggcgtaccggcgacggcaggccaatggcggcgaccagacgatggccgaggcttgagttggcgaagtcgatataacggtcagacatggaacgctctccgaaggctggggttcaaagggttgaccatcccagggtagcagtcgttcgactaggctcagtaatccagcccacaacagacagagggagctttccatgactcaattgcgccgtgtagcgatcattggcggtaatcgcattcctttcgcgcgctccaatggcccttatgccacggcgagcaaccaggcaatgttgaccgcggccctcgaaggcctgatcgaacgctacaacctgcacggcctgcgcctgggcgaagtggctgccggcgcggtgctcaagcattcgcgggatttcaacctgacccgcgaatgtgtgctcggctcacgcctgtccccgcaaaccccggcctatgacattcaacaggcctgcggcaccggcctggaagcggcgttgctggtggccaacaagattgccctgggccagatcgaatgcgggattgccggtggggtcgacaccacctccgacgcgccgatcggcgtgaacgaagggctgcgcaagattctgctgcaagccaaccgcagcaagtccatggcggataaattaaaagtcctgttacaacttcgtccccatcacctcaagccggaactgccgcgcaacggcgaaccgcgtaccggtttgtccatggggcaacattgtgaattgatggcgcagacctggcagattccccgtgccgagcaggaccagttggccctggaaagccatcagaaaatggccgctgcttacgccgagggctggcacaacgatctgctcacgccgttcctgggcctgacccgtgacaacaacctgcgccccgacctgaccctggaaaaactcgccgccctcaagcctgccttcgaacgcagcgcaaagggcacgctcactgccggcaactccacgccgctcactgatggcgcatcgctggtgctcttgggcagtgaagcgtgggccagggagcgcggcttgccgatcctcgcgtacctgcgcgatggcgaagcggcagcggtggacttcgtcaacggtgccgaaggcctgctgatggcgccggtttatgcggtaccgcgcttgctggcgaggaatggtctgacgctgcaggacttcgattactacgagatccacgaagccttcgctgcccaagtgttgtgcacgctcaaggcctgggaagatgcggactactgcaagacgcgcctgggacttgacgcccccttgggctccatcgaccgtagccgcttgaacgttaaaggcagttccctggccgccggtcatccgtttgccgccaccggtgggcgtatcgtcgccaatctggccaagctgctggacgcggcgggccaggggcgtgggctgatttcgatctgcgcggcgggcggtcagggtgttacggcgatcattgagcgctgaaactggcatattggatgcattcttaagtgatcaacggtcggtagcctctcccaccggcgagctgattgccgtataacgagtgccatacgcgtatttggtaataaaggacccacaataaaagctgatgaagactcctaaacgcattgaacccctgatcgaagacggtctggtcgacgaagtgctgcgcccactcatgagtggtaaagaagcagctgtttatgtggtgcgctgcggcaacgaattgcgttgcgccaaggtttacaaggaggcgaacaaacgaagttttcgtcaagcgtccgaataccaggaaggccgtaaggtccgtaacagccggcaggcgcgggccatggccaagggctccaagttcggcaagaaagaaaccgaagatgcctggcagaacgccgaagtagcggcgttgttccgcctggccggtgcgggcgttcgcgtgccccagccgttcgacttcctcgaaggcgtgctgctgatggagctggtggccgacgagtacggcgatgcggcgccgcgtctgaacgacgtggtgctggagccggaccaggcgcgcgaataccacgccttcctgatttcccagatcgtgctgatgctgtgtaccggcctggtgcacggtgacctgtccgagttcaacgtactgctcacgccaaccggcccggtgattatcgacctgccccaggcggtggatgcggcgggcaacaaccacgcgttcagcatgctggagcgggacgtgggcaacatggcttcctatttcgggcgttttgccccggaattgaagaagaccaagtacgccaaggaaatgtgggcgctgtatgaagccggcaccctgcacccggccagcgtcttgaccggcgagttcgacgagccggaagaactggcggacgtcggcggtgtgattcgcgagatcgaagcggcgcggctggatgaagagcgtcgccaggcgattcgcgcggcggacgatgcgccgccgagcaaggtgccggacgaaccgccgccgccgccgtggatgcagtgatttccagataactggaaatcacaatgtgggagggggcttgcccccgattgcagtgggtcagctacagataagccggctgatccaccgctatcgggggcaagccccctcccacattggatttgtgtacattcggtcaggcgcagcagcttccggacgccaactccttgagaatcggacaatccggccggtgatcgccttggcagtgctccaccaggtcctgcaaggtatcgcgcaactgccccagctccaggatcttctggttcaactcatcgatatgctggcgcgccaaggcttttacatcggcgctggcccgttggcggtcctgccacagggtcagcagcttgccgacttcctccaatgaaaaccccaggtcgcgcgagcgtttgataaacgccagggtgtgcaagtcatccgcgccgtacacgcgatagccgctgtcggtacggtgggcggccttgagcaggccgatggattcgtagtaacgaatcatcttggcgctgagcccgctctgacgggcggcttggccgatgttcatgggcgttgatcctccaaatccttgggtttccaagtcttcaacagtaaggcattgctgaccacgctgacactcgacaaggccatcgcggcaccggccaataccgggttgagcaggccgaatgcggccagcggaatgccgatcaggttgtacacaaaggcccagaacaggttctgacggatcttggcgtaggtcttgcggctgatctccagtgcggccggcaccaggcgcgggtcgccgcgcatcagggtgataccggccgcgtgcatggccacgtcggtgccaccacccatggcgatgccgatatcggcggcggccagggccggggcgtcgttgatgccgtcgccgaccatggccaccacgccggtttttttcagctcggcgacagtagcggctttgtcggcgggcagtacctcggcgtgcacatcctctatgcccaaggcctcggcgaccacgcgggcgctgccgcgattatcgccagtgagtaaatgactgctgatgtgctgggccttgagttgctgtaccgcctccagcgcgccgggcttgagcgtatcgccaaaagcgaacagccccagcactcgcggttgggcgccttgcgcgatcagccaggacaaggtgcgaccttcggcctcccaggctttggccgagtcggccaggccccccgcgttcaaaccgttttcttcaagcaggcggcgattgcccagggccaactgctggccattcagcgtgccagcgatgccgcggccggtcagcgattggctggccgtcacatcggctacctccaacccttgctcgctacaggcatccagtacggctttggccaaagggtgttcactgccgcgttgcagcgcgccggcgtgttgcagcaggagcgcttcattgccatccacggctgccagatgagcgatctttggcgcgccggaggtgagggtgccggtcttgtcgaagaccacggcgctcacttcatgggcgcgctccaaggcttcggcgtccttgatcaggatgccgtggcgggcggcaaccccggtgccggccatgatcgcagtcggtgtggccaggcccaaggcacaggggcaggcgatcaccagcacggcgacggcattgatgatcgcggtctccagtgacgcgccgtacaaccaccagcccaccagggtgatcaatgccagtaccagcacggccgggacgaacacctggctgactttgtccaccagcttctggatcggtgccttggcggcctgggcgtcttccaccagacggatgatccgcgccagtacgctttcggcgcctagggccagggtgcgcaccagcaggcggccttcgccgttgatggcgccaccggtgactttgtcaccaggttgtttcggcacgggcaggctttcgccgctgatcaaggcttcgtcggcgtggctttggccttcgaccacttcaccgtccaccgggaagcgctcgccgggttttaccagcaccaggtcattgagtttcaacgcgttgatggcgacatcttcttcacggccgtcgagcactcgaatcgcccgctcggggcgcagggcttccagggcgcggatggcgctggcggtctggcgcttggcgcggctctccaggtatttacccaacagcaccagggcgatcaccaccgccgacgcttcgaagtacaggtgcggcgccatgccagggtgagcggtgagccattcgtaaatactcaggccgtaaccggcgctggtgccgatggcgaccagcaggtccatattgccggcaccggcccgcacggctttccaggcagcgatgtaaaagcgtgcgccgaagatgaattgcaccggcgtggccagggcgaactgcgcccaggccggcagcatccaatgcacgccaaagggctccaccagcatcggcaacaccaacggcagtgccagtaggatcgccagcagcagcgcccaccgctcgcggagcaggcgccgggcctgatcggcatcggtggcggtttcgctttggggcagggtggcggtgtagccggctttgtcgacggcagcgatcagcacgcaggggtccatctggccgagcacttcaacatgggcgcgttcgttggccaggttgacgctgacgctttgcacccccggcaccttgcccagcgcgcgctcgacccggccggcacagctggcgcaggtcatgccactgatgggcaggtcaaaggtggtggatccattcatggggcagtcctccaggagaagttgcccctagcatcaaccttgacctgtggggaaggtcaagcgcgatcgttcccacgctcggcgtgggaatgcatccagtgacgctctgcgtcacgattctttttgctcagtattccaatgcggcgggtttcagatacatcccgtccggcccttgggcaatgcgcaacttgcgcacatcaccgaccttcagcgtgatgttctgcgcaggcggcgccagcaggcccggtaggcaacccggggcctggcccggcaacagcttcaagcgcagggacaggttgcccgccggcaggttgaacgaagtggcctgctcctggaacagccggcccgccaactggtcattcaggtacaggccgatctcgcagttggtcggcacttccaggcgttcccgggaaatgatcagcaccgcatagtcttctgcggcgagggcttggggcgctgcggccgacaggctcatcaggccggcaagggcaaaaaacgaccagcgcatggcgaatgctccgtggtttaaatcgacgatgagtgaagcttggcctttgaagcggccaaataccagcccggcagacatttgcggaacttgaccttgccatcgtggcaaggtcgagactgggtccaacctcatcaaaggagtcatgtcatgcaagtattcagcgttgaaggaatgacctgcggccattgcgttcgagcggtgacccaggcagtgcagggccaggacccggcggccagcgtgaaggtcgacctggcagcaaaggaagtgggcgtcgaaagccgcctgtctgccgagcaagtgatcgaggcgatcgcagaagaaggctatagcgccaagcttgcctgaggcggaaaaatagttagcgagctatcgtgttcaatgcacccaagcgcggctagactatcgggctgccgactcacttgggtgcccgatgaacctccgcataatcctgatcctgggtgccttgagcgccttcgcgccgctggcgatcgatttttacctgccgggcttcccggccatggccaaggccttcgccaccgatgaaaaacacatccagctgaccctggcggtgtacttcggcggcctggccatcggccaattgatctacggcccgctggcggaccgcttcggtcggcgcggcccgctgctcagcggcgtcaccttgttcaccttggcctccttcgcctgcgcctttgcgccgtcactggaatggctgattggcgcgcgtttcgtgcaagccctgggcggctgcgcgggcatggtgatttcccgcgccgtggtcagcgacaaatgcgatgcggtgggctcggccaaagtcttttcccaactgatgctggtcactggcctggcgccgatcctcgcaccgttggccggtggggtgatggtggggctgtggggctggcagtcgattttcctggcgctgtcgatattcagcgtgatggcggccatcgcggtcgccgtcgggctgccggaaacctttccggcccatcagccgcgccagccgttgtccggctcgttgcgtcgctatgcggccttgttgtcggaccgggtctacttgggctacgccctcaccggcggtatctcgattgccgggatgtttgcctacatcgccggttcacctttcgtgtttatccaactttacggcgtgccagccgagcattacggctggctgtttggctccaacgctgcgggatttatcctggtggcccaggtgaatgcgcggctgctgtccaagcgcgggccggcgtttctgctgtcgcgcagtgtgtgggtctacctgctggcggcgttgacgttgctgggcatcgcggcgttgcgcaccgatgcgctgtggccattgctggcgccactgtttatctgcatcgccagcctgggctgcattttgcccaatacctcggcctgcgccatgagcgggcagggcgcacgggccggtagcgcttcggcgttgctcggctgcattcagtttggcgtggccgccggcgccgcttcgttggtcggcgtgttgcacgacggcacggcgatgccgatggccatggtcatcagcttgtgcggtgtattggcggtgacgattgcgatgtcgacccagcgcctgcaacgcaaacgggccttgcaggcgcaggtctgaagagcgggtcagccagcggcagaacgttgctggctgatgggaaaacggtggggcgcctggatacgggcttgcagggtgtcggcaaaggcacgggcctcggcctcggtgcggaaggtgaaggcgtcctggtcgagacgcacctgccatttattgcctgcggattttgctaacgcttttatcaggattttcattgctgacttcctcacgtaaaagaatcgtggcaaaggcggccaatataaacccgaatacgctcacacatatgacaaagatcaactctctgactagcggtgtcgtccattactcacatgaataatggacgacactgacagccttttttcagaacccttccagcacgatcttgcccttggccttgccgctttccagcagcgcatgggcacggcgcaggttggccgcattgatcacgccgaagtgctcgcctaccgtggttttcagggtgccggcgtcgatcagttcagccacgcggttgagcaggttgtgttgctcgatcatgtccggcgtctcgaacatcgaacgggtgtacatgaactcccagtgcaacgacaggctcttgcgcttgagcttgctgacgtccagcgccttgggatcgtcgatcagcgccagcttgccctggggttgcagcgcttccaccagttggtccaggtgatggtcggtctgggtcaggctggcgacgtgggtcacgtgcgggtggccggcggctttcagcgcttcgctcaacggttggctgtggtcgatcaccaggtcggcaccgagggccgtggtccacgcctgggtttcagggcgcgaagcggtgccgatcactttcagggcagtgagctggctggccagttgggtcaggatcgaacccacaccaccggcggcaccgacaatcagcaggctctggccttcatcctgattaccctcacgcacttgcaggcgttcgaacagcagctcccaggcggtgatcgccgtcagcggcagcgcggcggcttcggcaaagcccaggcttttcggcatatggccgacgatgcgctcatccacggtgtgcagttcgctgttgccacccgggcgcaccagggatcccgcgtagaacaccttgtcaccggccttgaacagcgtcacgtcgctgccgacggccttgaccacaccggccacatcccagcccagcaccttggcggcgccgttttccggggcgacgttctggcgcaccttggtgtccaccgggttgaccgagatggctttgacttccaccagcaggtcacgcgggccggcgacgggggctggcaactcgatatcttgcaaggcgtttggatcgttgatcggcagtgaggcgtagtaggcaatggctttcatggaggctccgaaaaaaggatggcgatcaggcaagaaatttcaggcgcttgagttcgaagtgttcgatcacatcagcggccttggcgcgaaagttttggatatgcgcgctctggtcgtggtcggcgagcgccgcgtcgtcgctccagcgttcgagcatgtagaaggtctcgggatgttgcaggtcctggtgcaggtcgtactgttcgcaaccggcttccaggcgcgtgggttccagcaggtcgcgcagcaagggttccagggtggcctgttggccgggtttggcgatcagcgtggcaatgacgttaaaggcagtggacatattcaactccagacacgtgatgaacgggatgcacagatgattggctatttcccgcgcagataaaagcggctaaaacagcaggctgtttcaatgaaattttgataatgagcgggaatgcatgctgcgctttgatgatttgcaattgtttgtacgggcggcggacctggggagcctgtccgccgccgcacgggtgatggatttgtcgcccgccgtggccagcgccgcgctcaagcgtattgagcagcaactgggcacgcgcttgctggcccgctccacccgcagcctgcgcctgaccgccgaaggcgagggcttcctggaatatgcccgcgcagcgctgagttcgctggacgaaggccgccgtttattggccagcggccaggaccatgtcagcggtgtgctgcagctgtcggctccgtcggattttgggcgtaaccagttgctgccgtggctggatgaatttcagcgtgagtacccgcaactcaccgtgcgcctgctgttgggcgatcggattgccgatctgtttcgccagccggtggatattgccctgcgttacggtgagcccgaagattcgagccttatcgcactgcccgttgcgccggataacgtacgggtgctgtgcgcctcccccagctacctcgcacgtcatggtcagcctcggcacctggagcagttggcccagcacaattgcctgctctatatgctcggcagccgggtccatgaccactggacctttcacgacggtaaacgcgaggtcagcctgacggtgaccggcgaccgcttcagtgacgatgccgacgtggtccgccgttgggcggtggcgggtgtggggattgcctacaaatcctggctggatgtcagcaccgatgtgctcgcggggcgcttgcgcctgatcctgccggagctgcgcggtgagcgcacgccgctcaatctactgtgtgcccatcgtgcgcaactgagcaaacccatcaacctgttgcgggaaatgctcgtgtctcgctgtgcgacgttgaccgctcaattgccggagcgattgaacgcgatgtaacgccctccatcacagcaggaaatttcattcaggttctgtccctatccacgctgtcagacgccgtggaaccggtggtttgcgcccctatactttggctcccgcatcagtagaaaaataagccaacagggagtgaaaagatggaagcagcaccttgcatcagtcagatcgccagcttgcttgccgagcctaaacgaaccgccatgctgtgggccttgatggacggttcagccaagtcgccggtagaactggcgacgctcgccgggttgtccgcgacctccgcccatgcgcatttggcgcgactgaccgcaggcggtttgctgcgtgtggaagccaggcgtggcaagcgcctgtttcgcgtggcggcgccggatgtcagtgccgccatcgatgccctggccaggaccaccatggcctgcgcagcgcgcagcgcgccggatgctttgccgccgaccctgcttgctccgccgtcgttacgtcatgcccgtttgtgccatgggcaccttggtggcgagttgggggcgcagttatatcaacatctgctggaagcaggctggatcgagcgctacgaacagcgtaccgatgtcacggtgaagggcgcgaagcgcttggcaaaactggggatttttacccaggcattggcatcgccgctggtgtgcagctgctttgactggagccagcagcagccgcacctgggtggtgcgttggggacggggttgttgcaactgtttttgcagtcgaactggatcagcgtgatcaatgagtcccaggccttgcaggttcatgccatcgggcgacaggaaatcacccgattggccgtgccaccaaggagctgaccgtgtaggagccagcaagccgcctcctactgggttacggttttaccagtcgcgcatccaggctgttttgcgccaggcgtttggcctggtcctgggtcatgcccagtgaggtgtacaacgcgtggaagttctcggtgacataaccgccgaagtacgccgggtcatccgagttcacggtcaccttcacaccacgttcgagcatgtcgaggatgttgtgctgggccatgtcgtcgaacacgcacagcttggtgttggacagcgggcacacggtcagtgggatctgctcgtcgatgatgcgctgcatcaggcgctcgtcttcgatggcgcgtacgccatggtcgatacgctggattttcagcaggtcgatggcttcccagatgtactccggcgggccttcttcaccggcgtgggcgacggtgaggaagccttcgtggcgggcacggtcgaacacacgctggaatttgcttggcgggtgacccatctccgagctgtccaggcccacggcgacgaacgcgtcgcggaacggcagggcctggtcgagggttttttcggcttcggcttcgctcaggtggcgcaggaagctgaggatcaagccgctggtgatgcccagttgctgctcgccatctttcagcgccgcagcgataccgttgagcacgacttcgaagggtatgccacggtcggtgtgggtttgcgggtcgaagaagggttcggtgtggatcacattctgcgctttgcagcgcagcaggtaggcccaggtcaggtcgtagaaatcctgggaagtgcgcagcacgtcggcgcccttgtaatacaggtcgaggaattcctgcaggttgttgaaggcgtaggccttgcgcagggtttcgacgtcgttccacggcagcgcaatcttgttgcgctcggccagggcaaacagcagctccggctccagcgagccttccaggtgcaggtgcagttcagccttgggcagggcgttgagccaatcgtacattttctaaattctcatcaggtgcaatggcggcattctacaggccatggctgaaataatcggcaaaacctgaccagcaggattgttttcgttgcattcgcgcaagggccttgtgaactaaggtgtaacgaaacgttagcggcttggcgcagtctgtaccccatcaatgactgatttgccgtactaaaaggcccggaatgctcacatccctcaagcaagaaaaattcatgctgctggcgctgattgccgccatcgccgcctacccgctggagcactggatgctcaatagcgggcaaatcacggcgctgttggccggcgtggcgctgatcggctttatcgtggtggcgtcgatgcgcgtggcccatcacgccgaacaacttgcggaaaaggtcggtgacccctacggcaccatgatcctcaccctcgccgccgtgctggtggaagtggtgatcctggcgatcatgatgagcaacgagccgtcgcccacgctggtgcgcgacaccatctattcggcggtaattttctagacacactccgctttggtgtcaaagcccttaggctttgacctgctcttgctcttgatggggaagattaagatgtgtatttgattgggagtgctcttgcattgtccttcctgacacacctctatctatggcataccccggaagcccggagattttcctcagcccgtgtttgtgactctgcttgaggtctaaggatgacttgctgtgtggggagcatccttgccgcgagttcatacaagatcagcgacacgcggctatctgtcaggcatttggctgggcggaaagaaatggcgttacgtatgtgacgaactcagcatgaggagtgcgatgctcattccaccttggagggtttgatgccggtcgatagcgtaagtcgcatgtcgtgatcatcaaccgctccttggcgcgtgaaacacccacaaagaagccgcaacgctcctcttggactttgccccaaaatgtctgtgtttctacaccgatcataattacagagtggaattccaatcctttacttttatgaatcgtcagaaaacggactgcttgatcgttggagaacagatcaagtgctttgagcaaatccggttcttgctcgagcagtttctcaatttgctgtctcgtgttcttgataacctcgttcaatctggcatttgcttcgtagtcagaagaaagggtggtcagcacgggtaggccgatgttctttaggaacttcatagttagctcccaccatcctgaataaggcgcgtcagatcgggccaattttttcacttccttgcgctgggcaagatagaggcgctcgaagtttctctggatctcagattcaccgtcctcgtcattaaatgaaaccagttgctccatcaaattgatccacgccttcggttctcgctcccgatacaggcatgataggtagtcaataattaggcgagcggcgggctcattaactagatcttgagactcatgctcgttgcgaaagggaattcctctggctgccagttgctccatgagtagggtgccgtagaggtctatctgcctgggaaaaagaatcgctatttctggtaggggtattttctctacatctatccacttctggatgatgttggccaacgcggctgcttcgctgtgactgttgtcgtagtttcgagcgaggagttcgccgtcgtttccaatgatcaggtcatctgccatcaccgcagcaggatcaagtgttcgaatgatctcgttctgcatccgcaaaagccgaggcttagatcggaagtttcgatatagattgagtggtcgggcgtcgaagtcctttgcgtagtctataaatatgccatccagtgctcccgcccagcccataattttctgtttggtgtcaccgacggcggtcaatcgaattggcttattcatgaagacaagcttcagcagtgcgtactgctcagtagtgcagtcttgaaactcatcaaggaatacatcagcgtaggtctgacaaattgcatttcttgcaaccactgaattgctcaagatcttcgttgcgagaggtatgagctgcgcgaacttaatttgtttgccttgaattggttcgtcgcctatggagtagtttggctcaagagagtccccgcccgtgagcacgggtctaaacctatcaatgatgcgcttggcgaagccgtgaaaggtgtagctgtcgaagcgtgcagccagatcaagtccgcatctgcgacgaatccgttccttgaggtttatgctcgcatcgaccttgaaggagatcgccagtattcgcttggggtatcggcagtttccggtgcgtagcaaaaagtctgcacgctgcgccagaacttccgttttgcctgcgcctgggcctgcggtgagcgcgagcgactttccaagctccctcacagcgagaagggcgtttgtttccaaggtcaagccatcggcgactttccatacatccgcgctgatcattctgggatgtcctccagcgccgcgatgattgcgtcggctaaacgatctagcgatggaggaaggctttttagcagatcttcgtcagtcagcttcgcaagggcggagatgtgtgctgcgggcttgctacctaatttgaattttgagtgataggttccaaacagttcctgctcatttgcatcatattgaccggcgttacagtgactctttccgagcactgccttaagagttgattcgtcaggagggcttcgggaaacaccgtacgcttttgggtaggctagaagcatggagaaatctagatccataggatccgaaaaataaacgccccgtttttcaagttcggaaaaaatgcttattgttccttcctcaaaccagtggtcggttcgaactggaagatcttcgttccacttagctatttcccagttaggtagttttttatctggagaaaactttgccaactgattattgacgttgctaatccgcccccacccaccttgatgtcgtgcgacatcgagatccaagagggtcacaaaaggcgtttctaatgcagccagcaagcgccagaaatgattgacgtggcgtccccccagtggagcgattgtcaccgctgactcatcaacaggtgcgcctttcgcttgaagtattcttggaaggacaatttcctcactgtcaccttcgcctagtacaaccagcctagagaaataaacttcaggaaaagcctgcacagcctctcggacaaacttatgagcctcatcctctttgtcgggtagtgctatgcaggtgaccttagttgcacggctcgcagccaagcgtagatagcggatgttctcgggatccacgcggcggagcatggacggggcatgggtcgcaatgattgcctgagagtcagcccctccaattgagctattgagggcgttcacgatgcgcccgaggtaatgaggagagaggctgttttctggctcctccactgcgatcagtgtgaatgacggtggcttcagtttgtcagcgtcgaaagaaacgtccttaccggttaggactgcacgcccgatggcgtgagaggacaacaccagtgataggtaaagcatcgacttctgtccatcgctgaggcgagagaagtcgactagattctcgtcgtgccctggggagaacgacactgacatgtgtcttagaagcgactcaatttcggatgtgacgaaagtgagcttgggatcggtgaaaaaggtgcctctgtgaagtcgcttccacatcccattcaggctttcactgaatgcacttaccgactggtttcctgataaacattcgctgatttcgtcagtgagtcctttaatccttgcgcggtcatcttcccaattgacggctcgtagcaagcgtccgagcagggcgttagctccataggttatgtggtcggcagggtctcgtctggcggggaggtaatgcatttgaatggtattgcgatgcgcccgagtgacgactgcggtcgatagtgggttggcgtttctatcaacatcaaggacataaactaggttctcttcaatgtctccatcaatcccgatggtcgcgctcaatcgatatctaacacgcgggatgccgtcggctgtatccaatcgcatatgagcgaaatgcggggccacggtcgagttgtcttcatcctccagaagctctgggaattcgaaatccgcttccagccataggctgcgctcctcaggtaccaaatcctcatcagcaggcacatggaagtcagatcgcttgatccgacgcaggcttggatcaaaggcaaacaacctgcagagcgcttgcaggactgctgtctttccagagccattggggccgataaggtaggtgacatcctcgaatgtgattaccgtaggttcattgccgaaggattgaaaattacatagccgaatactgtgcagcttcattgctcaccgcccatcgtccaggatgtgtacgtaccgcgtctgctgactcggttcgcgtcgccgacagccgaacgggtcggatatcgctgacttagaataggcggtttgatttaaaagatgttagtaggccagcattcagtaaagattatttggtgcggtcttgaaggctctgttgcagatcgcctagctattgatgaacggcatggcgtgcccattgtctagaaaggtgctctccgtaatccggtgacgacagggtaatcctgagcctacggagggagcgtatgcggggcattagcatcggtatgcattaggtaggtgggggaacagaataaatcaacgcaaggagccttagatggccggcagtagcttgttcgcactattggatgacattgccacactgctagacgacatctcactcatgagtaaagtcgctgcaaagaaatcagctagtgtcctgagcgacgaccttgctgtgaatgctgagcaggttaccggcatgaaagccgaccgagagctaccggtggtatgggctgtattcaagggctcgttgagaaacaaagccatccttgtgccttgtgctttggtgttgaacgcacttttgcctgcggcggttcactggctgctcatgattgggggggcatatctctgttatgagggctttgaggctatcaaggacaagctcacggctggtcgagacgatgacacagggcagccaaagaaaacgaagcctaagacgcctgaagagcttgcagcttatgaaaagcggaagattgcaggggctgttcgaacggacttcattctgagcgccgagatcatcgtcatcacactaaatatcgttactgatgccccgatgctccaacagattttgacgttagcgctgatcgcggtagtcatgacagtgggcgtttacggattggtcgcggggatcgtccgcttggatgatgctggccttattctccagaagtctaaagctaccggtacatggggttctgtggtgcggactgtcgggcgatggctgctgtcggctgctccgaagcttatgaaagcattatcctggatcggaactgtggcaatgttcctggtcgggggggcgttcattacagaaggcatcgggccgatgcagcactttgctgagagactggtcgaaggggcaggggcgtgggaaaccttcgcaactttaggcattcactgcctggtaggcgcgcttgtaggcatggttgccgtacttgtggtcaaaagcatcacatccatcactggaagtaaggcttaaagctagctctcatcgacgatgttgaatctggaatcgcatacaatcttacttcgtaaggaatcgctgggttcagcgccgttgatcccataacagcgtttggcataaggtgagtcgaactggcgttttaagcctgaaaagtagggcagtgggccgagagaggagcattggctaatgctaatgtcctgcttctctagccctcatatcatccgttatgaccttgatcatcttgaaatactctgctctaccttggattgcttctggagtagattcaatttctagatttgccatatggacagcaggatctatgacgtaatggctcgcctgcatatagttcttgatggctgggataatccagcatgcgggatagaaacggagaattccattaccagccttctgaatcataccgacccaggcaacctggttggatttaggcattaggttagaaaccatcccaccactcattccattcatttctgagtgtgtgatctgactaagaaaacgcaggatgggggctgatccttcgaactcacaaacaccgtgaaagatatgcttattgatcactgtcgagcagttgtagtcatcgccatacggatactcaatcgggttttcatctattgggtagccagaggctaccaataacatgccgtcatacaaatcgcttacagctacggctatacggccattcgtgccatctaggtcgatgaatttatcgggaaaacggaatagcgaggatgaaagctcgatcagcacgatgtcttgcatgtcgatacagggactatctgccgttatcagctcaccgatacgccagccgcgcattgggaatcccataccctctattccttcccagcctctcttagcaaagaggtgagtgaagaacggcgactcattttgtgccgcctcgtagttcgcatctagaacgtgttgagccgtcaggagaaaaaatttctgctggtacttgatcagtattcctgtcccgcctttgctatagaccatatcggcgtgataccggccaagctcttcaataggctgagagcaatgggtgaatataagccttctcacagactgaattacgttgctctgagacgtattctcgtagaaccgatttagctttcgtactggaattttaatgttttaacttcctgtatcgcagggtagaaatttgttgcggttacggagcttgaagcttcgtctgcatgtcagcgacatcgccctattttctagccaaaccgctcctgagtatcacagccaaaacaactgccagccaacggttagccaactttccaaggtagatccaccggcaggtcaatttgcaagctgctagccgctacgtccagatctgcggtggtctccgcaaccatctgaacctgaaactcggcatctgcatatcgctccataagtggcgcacgcatcagtaatactcgaacgcgagccttgaggcgctgcccctctggatgcccacaagcgatcaacctgcctatgcgtcccatcactcgacgcgcctccttttcatcatcagcggacagctgacctgaattaccttcgaagcgatcctctagctgtttcacggcggcgcggattgccatccgatgttttttgggaagcgccggtatcggcccgttcaccactaatccggtcacggtgacggcgtcagctttatcgctagtgatcaatgcttgcccgcgcttacgaacatgcagcttgctccgcttctgcaggcagcctttttgtccgagcatccatgtgacagaggcaataacttgggtggtggtagcttgatcaatacgagttttgctagatacagtaatgtcatctgcgaagcgcgaatacgccagtccctgagctttaaagcgagtgacgagcgccggctcgatatcccaaaacactaggttggccaagtaactacttgtactcgccccttgtggaacctggccctcacgagtaactagatccgcaagcagagtggctacatctgcggagaagcggaagagacccacgaacaagcgatgaatgtgctcgtttgtaattgaggggaagaaatcagcgatgtcctgaagaatgactgtcttggcgccggtatgaacccgagcgttcgagtaaatgctgcggggtagcttgggatctctgataccgccgtgcaggtatccagggaacgcaaccttgctgaggatccgatccacgatcttgcgctggatagtcttcagaggctcatgagcatcataggtatgtctgggtgttatgccgtctttttttgtttgcgggacatatcgataaaggcgagagctgcgatgagcaagtgcgattagcctctcgactggctctccgagagcacgtgctaaggcgctgatgctgtggatagggctatgaggatagaacggagcatccatgtccaagcttccggtgatgggccggccccgaagaaccggcccctctgaattcgaatgatgtggtttgttgtgtcatgggaggttctcaataaatggaatcaccactgtctcgacaaaatcccagccctcaacagccttctcccataaccagatgcatagacgaatacgtgcgatccacttgagcagggttactgccttcgcctttacccacgcaatccgacccgctttaggttcttgagatggagctgtctcgatgacacgagcatcttcactgttgtgcatagactgacgcgccttgcggcgcgctaggttctttaaattaaccatgactgatgttcccaacgacaggcgaaattgccccgccgccaagcattccgggccgaaaggaacgctgaagatgccactacaaaccacagttctgcttatcaagtcccttgataagccgtccgccgcattaccgccacatcacatttcgcctcaacgcatcaaacgatcagagacaaacccttggatcacctttgggattgccctaggcgctaagcactcaggagcgatgggcagcaccaacctgcacggcgaagaaagccaaggcgaacaccaaggcgaccagtttcccggtcaaaaaccgcgagcccaaatttcagtcatatttaaagagcacttgggtggtagcacccaacagacgcagtatttatcagaataaacaaaccggcgacaactgttatttgttgcaagagttgtttttcgtataagtcgtatttttgactatataaagcgtcaaaatttaagtgtcactcgtattagtgccacctaggaaatttatcatctttcaagttgtcgagttgggctcgttgacctattatcccactaggcggtgatggtcgcctggcgcctgtttcgcgaagcaatagcccatctgtgacaccatccagcattacatcggcatgtccctaaccagacgctgcccggtgaacaggcaatcggtcacctaagcgtcgtagatttaggagctattgccatgtctgatttttccccgctaaacatcttcaaatctcaagctaaacagcttgctcgtgatcagggcctgaagctttctgtcgctcaagaaacccttgtgcaaaaagcaggcttcgctgattaccatgagttttcagtagtcgcccagcggaaccccagagatccgcgtctgatggtggctgtgtttgggatcaaagactttccccaagcgatccatgaggacgatgtctacgcagatctggagcaggaacttgaggagcagctctctgatgcgattgcagagaccaacgcaagcggattcaccatagacgccttgacgatcaataccgctgactacaccgattcaaccgggatgctgagcttgggagtctcgctgacctaccagggccagcaagaccaggaacgggtgtatcacggtgcagcgttctttcttactgccacggtcgagttgctgcgccgtgatagtaagtggcagcttgctgaggacggcgtgtccatcgcggacggtgagtctgatgctgaccgcgaccgtaggtctgagcaggagtattgggcaacggtggaagaagcccgaagtagcaaccgcatgtccatggcccaagcccttgcgattgaactggggataactgtcgacaacgccgagcttttggccggatcagagatcacaaccaacgaatctgacgacgggctcgtatacagttactggatcaatttcgaaccagaagctgaaggtgaactgagagcagacctgcttgcacgattcggttctctagagtacgagctacacgcaaatttcttcgatgatattgagcacgacttctgaggtgatcaggtgatggccagtttcaatgctggccattcaaaaagctttgcgacatatccaggctccacacgcgaggctacctcaaggcgttacaggttcattacagttcatcatgaaggctctagcgaaacggtactactgccgccggacgcagctctcacagcactgatcccttttccttctttccttctcagctttggcgatgatcttcgtagcctttgctgcggctttgtccaaagatggtagtttttcgatagcttccaagtaacctgggtcgcgctttctagccggatgagtatctggagtacctataaagtcgtgtctagcagctttataacgcttttgcatccaaacatatttttcaagaacaccagaatcagtattttttaacccagcctttatcaatccagacaaggttttcaaatattctgggtatgcgttgctgtccgcccctaccgtttcaaccacacttcgccatgaaaaataatcgaaaaaccaagaaactttaccatcgctatccttatcccgctttagaaatttctttattacttttagcacttcaaccttgggcttcttcaaggctgcgttaaatatttcaggatcaagaataacgcgaggggccttcgcaaccttcgactccaagaaataggctctattcatggctggccctacgacaactttgtcagtgtgcaggagctgaccataggtcaagccaccacgtattagatagcctcgatctgcgagaattaccactatcaaactgagtttatttacgatctcaaatagagcatcaggactatcgagcctgtatgaaattaccaggcagtctgaaaactgagttgcttgaaagtcaggagcatttccgatattagctgtttccgccgcatcactaagggcatcaaccaaatcatttaatgtttcaatgtctttttctgtggacttaaccttctcactaaatcccaagaagtcgagaaacaatgtcagccgtttttcatattcaaccgcgttacccatactctctcccccgaggaaaagttcgaaccatgtccatttttttggactcgcagtacactacgtggggcatccagatgtgtttttcaaccctgcggggtttctaaatagggcttctcggagggccatcctctatttgcaaaacaacctaaagcttgtccattttcgtcgggaagctctgctcatgagctccctctgcatcccccgaggccgaatcgaccggcatgagctagtttgtgattccccgcaccaccagccactcacggcgtcaagcacacccatgagctttagtctggtgatcggtggtgcagcggcaaaaggtcgccgtgatctccctctgtttgaagcccagcactagcacttcgtccttgctgtaccggaaaccctacctaaagatgcgctggacaccctcctgggcagccaaggtagaaactggcgcggccatgccttagaaagctggtggagagggagccacatagtaagcatggcataatgacactctcatacctcattaacagggagaagtttgtggacaaggatctatttaggcatatgtttgaaacccaaattaagaaagaatttggcgacaatgcctcattcgccacacgagaatatgttcatgatcgaaaatacaggaaacatcgtgtaagtgggagaataataggccacgggccggaaggcgtaagccagctgtacgaaatcgtacatactttgattacagatgaggagcggggtaggatttttcctggcgcatttgacttagggaacttccaagatattcctgcagagcgctgcaaatatgtagcgcttgaaagtgagatatataacgagaccaaaatcgaccccgaggaagttttaaaaaccataaaaaaacgcattgctgatttgctagataagaaatttagtaacttcttttcaaaaaacccatcgaaatcacttaaagtccttaagactctttatagattccagagagactatagattcttatttactctattggcgcccccccataaaaccggtaagccatcgtttgaaatacgagactcctatggaattgatgggtcgaacgaagaagtagaaatcatttcggatttgaagactcatctgagttttgagataccgcgcgagcgtctccgtgcgattacatctgcctacggccagatgcgaggtgtactggatgcaattgaggaaatgcttatccagcaagctgcttcccagtgcggcaacaacctcaaaaagttcgagctgatcgtacaatacatgtcggactgtattgagagcatcctcaaaattgaagatcgagagcctgtagaattaccgctggatgaacttctatttacttacttgattcagctcgagttctcacatcacgtagcagccagttcccacctctttgatgcggtcattgctaaccaaccgccttttgttgagtcatggagcactattggtcagctgatgagtaaccttggctttcaaggcatctctgcgcagcactttatacgcagtacggatgatctcatcaaggacttcacttcgggggcgtcatcattcatcaatttttatagcactatctttgatcgagagatcgatagtgctacctacagtaaagctctaccgctcttcgaaaaactattgaaagtgcacagttatagcgaagcttataaaaacattcgatttactatagctattggggcaatggcgcttgtgctaaccgagcttcatgaaagcactccatataaaccttattggtatggtcaaggtaacatcaccggtgggctagttgaatttctcaaaagcgttcgattcgagcacattaatctcgattcgccggaaggatcaacgcggtactggactgggcgcctggattacttcacttacgccatggtgggtcaggaaacaatcttcaaggcacgattgatcttcaataagactatcaacgagagcatcattcgtatccttgagaccctggatcttgatctattggatgaaaagctctcgcttttcgtgtcaactaacggaggcacagcgctgtagtgagcagaacccgcctgagttgcctcaggcgggttgctggttaaggattgtgacggtcgtagtagtcgagtagctcgaggcccgcacggagcactcgagacacatcgaccaccagacgccaaacagatcgaatgaagtctttcattctattcaccgttttcgcggcgctcaccctgcacaaccgtcgttgccatgtacaggatcgctgtcatccaaggacgacgcgtcgaacgcagtggccttcaggccgacgccggaattccttccggggcttccccaaacccacggggaaggcgaacggtgtgggccactcaaaatcctaccgtccaagcggtgaaccgcagatgcacatccctgtgcaattggacggtgaaatgtttcccccacagctttcaccggacaggccatgcgagatggcgtctgtctggatgcgattctgtagattcaccgcgaaggcctgtaggggactaaaataaatacatataaatcaattagttaacagaataagatgtccagtatgacgctagctgaaatccacttctgacggcactccaagaccatacacgcaggcgcctggggcacgcaacaaaactacggcccagtgtctggagatgatcaattcacagcgatagggcggcgggtgaacgcgatgccatccatctcttccgggagcgtcggaagctgccctttcatccatttagcgtagatgctggcgagcgttccatcggccttcttgcgttgcacgaatgcgttcaaccggtcgagcatggccgcgccttccttccgtacccgcgcaggacagcgcttacgactaccgggaatagatcttcaaggcagcccctcaacccgaccctgatgacgtcttaatgcgattccaaggcggtatcttcgtcaagccatgatcatgtggcccgcctgaaagactgggcatctcaggctacagcttgaccggcttcagggtaaattacacactcgtggcccccccccttgggctgtgatggaaaacatgcttcgactggttggcagctctctcgatatcacatcagccattaacgacttcaggctgtcctaccaccaggacttcgcaaatgtgcaggtggttgcccgtcgatatctcaatgcgcagctgggcagcgcaaatgcagtcctacttgcccaggcgctatatacagctttgcgcaactggggggcttgcaaacgcagaagcccaactcttcgtcccgtcccgcaaatcgaaagtgctctaaagggcaagcggcttcatgaccgcctactcaaactgagccagcatagccttgcggcattcagcctcaatcagcaggagcatcgtcttctggacagcaatgcgccaataaacgatgttggagccttcgacaaggaaattctagggatcctgaataggttggcggatgtgctgtttttcaacaacaccggcatcacttaccccatgaaggccctgctactcatcaccgggttgatgccggcactggatagccaggtaagaggcgggctaactcgagcggggaaagcgggcttcaccggacaacaactcctgccgaggaatgtacagcaaggcgcaggccgtcgaatctgcgagcttccgttttatctggggcactgctggagcctacaccgggaagtgttcgtgaaggggattctggagagcaaccacaaggggctgcaagacacaccaggccgggttttcgacatcctgctgttcatgcagaaccaagctacccggaaccaaatcctcgcctttaaggtggagcgggaatggccgtaacagccattctctcccctaccccaattaagactggagagtggggcagtcgttgtaacccttgtcatcaacgccgaagaatgtcatgcggtcagcctcattgagtggcgcatcagcaatgttcatgaccaccggcaccctagctcggcaattaaaggatgctcagcacgttgtggtcttcactggtgccggcgcatcagcggagagcggaattccaaccttcagagacgcactgacgggactacgggagcgcttcgatcctgcccaactagccacccgcgaagctttcacaaacgacccgagtctctgttggcgatggtacgagtggcgacggagcaaggttaatcaggcgcgtccaaatggtgcgcatgtggcaattgccgagctcgccaggcatgtgccaaagctgaccgtggtgacacagaatgttgatgaccttcatgagcgcgcaggcagccaagatgtgattcatttgcacggaagtctgcactctcctcgctgtatcgactgtgggctcgcatatcaattgtctacaagccctcaagcgctgcctgaggaaggaagtgaatcgagccacctcagtgctgtgcctgagacgggtatgttcgtcctggagtggtttggttcggtgaaatgctactcgaggggcatggcaggcagggctggaagctgcaggtgagtgcgaagccttttcaacgattggtgcgtctgggattgtttacccgggtgctgagctcctcatacgcgctttgggccacggggtaactgtcgttcacatcaatcctatgcgcttcgatatcagcagccacgagcactttctctaaagccctgcttcagtaatgaagcagaggcctacgtcgcgagacctttgacagacctactcgtgatttctaaggctgtaagagggccagctcacatcattagcctgggtcaaaatcgcacccgcgccggcagctgccagaaactgagctgctcagcctctctacaaagatgctgagcagctagtgtaacgctatctattgatggtcagattatatgtttagggtcgaaggttcggttgcctgggatcaataatttacggtcactggcgattggtggcgcggtttcgatttcgagtgcccatttggggattgcgagctcttctgaaattcgctctcgaatacgattgatatagaaagttcgtgtatgaagtaaatgtgtccacagaccgtccccttgtggttcgggtatatcctccattagttcaataccatcaagtgtaacggaatttagttcgctgatttcctcaccatcttctccttcggcgcgctcgacaggggtcgatattataactacatgtttacgcgcagtttcgccaggcaaaaatttcagcctgccgacatgcggttctagctttgatagaatgaagacgactacatcagaatactcttgcttcgtcaccaatgataatggtttctccgcataaccaaacttcagcgtctcgcggaattggccgtgcgcatcaaaatatatctcgaacagcatccccgccagcatgtgctttgcggtttcctcaggaaaatgagcaagcctagactcaaggtttcccatgaattccatggccttctgagagttgccacatgctgcttgataaatgtttctccctaatacaaaccatgatgaaggtggaaactcctcgtcgcgaatggaagagattttcagcatggccggattttgggtgtaccagttatgagattttaattcatctattatctcatttatagttgatggtgcatcaacctgatacaaagcgtctgcgagggcttcttggctgtattgaagtcgtagttctacttcttccattgctggtgcctcaacggcaacgatctcattccctgcatcagcctcaggaatatgaacttcctcctcaggagccgcagttgcgtcattctctacctcagcgattacggtggtatctactagcaactcctgcgtattcacctggattgcagccgccagttgagagaactcagtaccgttgcttcgtgatagaccctcgattagtgtggctaaggtgcagatggtgatatcaggatgtcctgtttttcgcttaaattcggagaccagccgaggatcgattattttaatttccggagctgagttccctactgactttcttacatctctgacaatctgatatctcatcttaggcgcatagacccagtcagatttctcatcgttggttacaaagagcactttggggaactgagccgaagcagcattagatttttcgagtatctcgtaccaaatgatgaggtcaccataagggttttcgtctttgttaccatccttaaagcctgggggcattcggtgttcgaagcgggcagccccctcatgagcggctctggtgcaaagtgaggagaggtcagaatcaaggatgcaagtggataagtggtcttgtatttgctggtggatagttccagcgtcgaattggtgtttaaatacacctagatgtttttctagctcttcgatagctgctcgaaatccatttatataagctaagcgatccccctggaatgacgttctatgtaaaatattgtcatctacaaacagtgcggctgtttgatgaaggttttctaaggcttttttaatttgggtaggttctttacttttgggagtgtacgactcaaggttttttccggtaactcgcgaaagatattcacttgccgcccaggcaggtatcgcgagacgctcattcaaaacggcagcatctgaccaagcaaaaaactcttgccgggctgcttcatgtagtttgtaaaggtaagctaatatgttagtgtcgaggataattaatgtctgcgcagaaagagcgagatccgcaatctcacgaatatgctcatccattgtcttgtcaatttggtgataaccgaacacaggtcatgctccttgaaaactttatagaaaaatttctatatgggccaatcagctgaatcagagctcctcatcttcaccgcgaatccagtggtgatcaggaacgatcattgttccgataaggccatccgtttgctttctcaggatttcctcgtgctgagaaattgccagtgcgagcatctggattgcagatctcgcgacccgaagggcacgcaaggccccatcgataaaatctgagcggttgagatgctcgatttcaggagcctgcctcgcttgcgagggatccccaaggtcatgaagcactacgaatcggtgcgtacccgaattccgcagatccttctgtgagcggagaattccatctatgccgtcatagtcttctgccagctcggccaggccgtacattgcgtatacgcctgcacgaatcagtacctctactttttttgtgagcggagtacctgttttcttgtctgcggaatctctccacaacctcccgaaactgactttgttgggagctaatcccagcttgaaatagtagtttgccgttacggctaccttgtcgagcaggtcaagggctgttcgatgcgccagtatgagtgccgaggtatcagggccgtacattgcatagtcgagagtgtctgcaaactgtcctgtcttcggccagacgctttcatcacttgcacgccatgtcaaatcccgtgctaggacaaaatcgctcttcagcatattgaacatggcaaacaatggcggcggtctgctgcccacttctggttcactctcgagaatacctggaagggtaagccaatcgagcttacccaaggatgcttccacgagttcgacagcaggagcaagtgtaagacgttcctcttctacccacctgatgaatggattcgtgtgctcaggccgagatggcggatcgcttagctcactggcgagtgcttcaaccttggccgctgcgcttgcccccgcgtactggacaattcgctccttatttctaagtgcctgcctggctagcatcacggcttccatgcgcgttagctctgagcagcccccacgcttaaaaagccacatgagatccgatgccgcgcagaacgcagctacaccgttctttggatcaaccttcagagcggcaagccgtgcgtcatgagcttcagaaagccggtaggtttttgcgaacaaattagcgatattcgtccaggcctgagtgcgtaattccacatcggcacctacgtcttgcaaaaccctccaatagcatcgtcgagcttcggctctgtaggcgcgggtttgctcctggtgatctacccattcagactcatcggccccacaatttgcggcttccacgagcccgtttgctaggttgtaggtgatattagccgtcggatataggccatgaagctcgcgatatagctcaagaccctcctcaatggcatcctggcgtccaagtgaggcgccggcattaaccagagtggctgcacgcagggccatcagattaatgcgatttggcccatctagatcgatttcacgagcttgttgtactgcaagtgtgggtgcagcatccaccaaggcattgaggtgtgaggagagctttgagaatacgctcaacatgtctggtacctcctttcaaagtgaacgattcagcgatgcaggcatgtctcactcatccgcaaatgcttccagggcggcgagcagcttggctagttcagtaaggttggccgcagtgacgatgtcatattctcctcgactactcagccgatatacttctcgagcctttttgacccgttccagtagaggaacaacaatgcctgatgctctttcaagaaattcgttaatgtctgcccgtgtttgagggatcttgtagcctttggccgcacttgtgatgatgacgtccgcatcccgaagcttggcaatgccactggatcggattctctggccgttaacctctcccaatccgctgtcttttagatgggccatgatctccgtagtcagcacgtaatccttggtgacgaattcgctttgaaatcttaagaaccgcagaatactcaattgcaggcgctcatcctcatcaggatgctcaccaacccgctcgctgaaacggtctgcctggcggagagcttcctggtgtacctggtagtctgcatacccagactcatttgtcggcggcggcagaagagactggtacttggatggccattcaagcattccaagagtcaggctgcggaggattttcttataggcaagaactgctgcttccgaagctttctcttcgtatatctgagcgactgagccagcgaagaaatctgcaacctgaaccaaaacgttgtccttactggccatcgtctggaaggcatccttatcgccaaataggtcgttcacgaatcgttctgcaacgtagcttttgaggctctcctgaaattcctggccaccatgctcgtctacgatcatctggaggtcagggtatgcacggaacaaacgttcatagagcaacccgttcacgtattttatgaacgaggtcttgatacggaggccgccgtctttgtgaattcgggacttatcaacgacggtgaaatagagcttgaatggcagcacagctagctcgttgaggattcgggcacggcgatctgaatctttgggcttcagattgctagatttgatctcgcctgtttgaaaatgacgcgtgcggagtgcttcagcttgggcataagcagcttccagatctttctctgccaccagaatggagcacacgatgaagaagcccgagcttcctccctttgaagtatcaaggtcggaattcccggactcatccacgaaggcataggttctgtccatgagcttgctccatcaacaacgtgctgagcgcagtgggtcgcccaatggcaaggtggcgaactcagttcgtcgcagtggtagtgcctggagcggggccttcgctgaacgtgtagttgatgacaacgtcattgcggatcaagacgtcgagcgttttctgagtgcccgtagtcgtcaccttcatagtgaccacgtagctttgagcatgggctgagccgttggtgtaggtgtagatccacttctcgtcagtctcgctgacggcgctcttggcgtagggctcgccgaatagcgactttagttctgcagtggtagttttacccttggtgatgctcgctacactggccgaaggaaagtctcggcctgccgtgtagtgcgaagtagcgcaaccgccaagtaccacgcacattcccagaatcgcgatgagctttttcatatccgtccttgatcgtagaaggttccaatttagctggcatcgaggctaaaagccatcaccaccttgatcacctgcgctcgcgcttgtcggcagctcatagcacactatcctgcgctggaactgcagcattgttcgccctcgagatcctctcggcataaggtgccttaatcggcacattaagcccttaatcaaggattaatgtgccattttgggatcactacgccagcattcattcggtgggaagcgcaaggcttgtgatgaagctaatcgccactaaaacgcacataccaaccaacagcgggattgaaccaaatttctctagagcaagtgctgctacagggcctgcagcctgggcgatcagcgtgggacgagccagcagccccatgcgtgttccgtagccatcagcgccgaatagagccaagggtaatgttccgcgagcaatggtcagaattccattacctgctccgtaaagcgccagggctacgaaggctagccacgggatggccggtaaaagtagggcaatacccacccctcacagcaggatggcgatacgagccgaccaggtagggtgcgggtttctttagccacgtcgactatccattcgcctagcatttttccctgataacgacggttttgttgggtgaagaaaacgaccatatagccttccatttctatctcctcagcgagtaccaatcatttggtaggacagaagcccggcagcggtcatcgctagcgaacctacgacgtgcaacgaaattgagccgagcgcccagagcagtctgccttcctgaatcaaggcaaccgtttcggctgaaaatgtagagaaggtggtaagtccaccacagaaacccgtgatgagtaggagacgccactctggacttagtgtcggagatgcggcaaagaaggcgatggccaagccgatgatgtaacccccaaccatgttcgcgaccacagtgcctggaggaatcgtaggaaacagagcattcagcttcatccccaaaagccaacgcaaccaggctccaagtgaagcgccaacggcaatgacaattaatgacttcagcacggagagtcctcctcatcagatctgagtggactaactggcaagcagctcgcgctgaaagaaaatggaaactcgaagggtaagatcatagcctgtcctaaaatggaggacagggagacgcacctacgcaccctgtccagggtcacgtaggcatcatcagcacgaaggcggtttaaggaggaatgccatctcctgtcctgatcctatagcatcagcgccaatggcatcaagagcagccgcatgcaagcgatccgaaggcccttttggctaagtaagatgtttgatcaatgatccaggtacaggccgaccctttgcacaactaggtcatttggcgcgtttacatggatttaaccgataccacttctacgtacttgtacttcttcctagcagccttcacagcctcctgctcagcaagcaaagagctcaacgtatctgcctcgtgaaccaactcgatcattttcccttcaaactcgtttccaacgcgaagcgtgacccgcagcctgggagtaaaagcttttgccgttttcttcttagctgctggagcgaccaccgatttcgcgagcacaacttcttccactggctcctctactgcaggagcagacatctgctcctcgggctgaggcgtaccgaataacgcacgacgcatttcttcttcagttaattcagagttcatagaacatctcaaagggggcggtaatcagctcgacgaattctactaggatggctgctccagcgtgtccactggaagcatgtatgaatcacccgttgctcgacctacattcctagatcgacctcgagcctggcccccttcaagctgggctgcagcttttcgacaggcatggcccgcaacaacttgtcgacaagatgctcggcgtgagcggagtagatcgcgattctgtccggctctggcggcctgtaaggtactaccgcaccgacagatacttgggcaattctcagtatattcagcacgtcattgccaatgtgaagactttccaggtactcgacggttgcgcgggctcgcggctctgcctttgtccatagttcgacaacaatgcggtgaaatcctatggggccaaggtgttgcagagcactcttccacagcaaaccttcttgggacattttcagcctggtgctggtcattcaaaagtcacggctgttcgggcttggttgttttcaaatacctacgaacagtcgcttcagaaagccccaacctttccgcgatctcagcaacagaaattccccactgcttcaatcgattggcctcaatggcatttctagccgcatcaggacgagctggccgcccaggacgtggctttccagttcgagcctgcgactcaatctcaaggtcgatccctgccttcctaattcttgcgagttgcttcgtaagacgtttctggccgtccttgaatgactcgtgattttgcatggaggtcgccatcagcaggagcgtagccggatcgaggtctaggatcccggcgagcctcaccaggacgtcgagtccaatactgacttctccgcgttctatacggctgaaatgagagcgcccaagattgttgatgtcctcttgggacagaccttggcctctacgaattccacgaaccacgacagccagtgcttctgccgcatccatcggtatttccccaaccaaatccgaggataaagccacacctagtagtgtcataacacgcccaatcaggttcgttatgattgccttggggcttatctagaggtttaatagctttaacccatgcgtcacggccacgaaaaagcagccctgtcgtggatcagccaagccatcgtgagcggcgggtagagagggttgaattgtcaatttgatgttaattacttaggggaggccttatggctagcgtcgtagaacccgactttatgaaggggccacgtacaccactggaaggcctgtcgagcagctctgatgcacgagcgctggcgaaccaacgttttcccgaaaagccttactgcttggttcgagactggacaatatttcgcattgaagtcacccgcgacgaactcttcaaatgccatgcagcgggccagctcccgatgatcctgtttgctcacaacgtggcagaggacagccaaggtcgtttcgaacgcggcgattgggttcgttcaagcatgtgcaccggtctccacgaaggtgttgcgttcgagaccagaaactctgtttacgtattgattggccctggtcatgaacagctcgcgagcctgaaagacgttttctccctcttctaacctgcgctctatatcggagccccttcaggccaaggacatacgatgtttagaacacacgacgccgacatgctgggcctaccgggcatgttcggtgagggtcagtaccaatggcatcaggtatccaaagtgcttcgtaatcactggtatcacgtaactgtccaggccatgtacgaggacagaatttcagaggcgattctgatgatcgacagcgaaccacggcttcagcaactgctgattgcccaagacgcggagacgatcatcacagaggtgcaagtagtcacacctgcccacatgaatggcacgggagtttggcgcatggagaaactgaccaaagtgacgcttggtgaagaccaacacgagtgtgttgtctgcctgctggaggtcgagacaggctccaaatatcacagctctcaccaacctggcttcaacactgatgtgctgagcaatcttcgtccgatctatcacgcgaacatgattcgtacagcctgagatttaccaagaatcccgcacgatatcagcgcagatgtttccgtgcggatttcctggtaacgccatacgggctgcgaaaggagcgcaattatgctgaacactctggatgtggattttcatggaaaacgacatacggatttcgatctcgcacgaatcctaaaagcaaaagcgcaaggcttcgaaaaaccgataacagcctatctctgcggagtatccataaaggctcgtgctggattaggcgtcgtgtttggtcacaaccgtaaagaccaatatggacgtttcggcgacggtcacctgatccggacttctgacgtgattaaggcggagcgcgagggccgattttgggtacttaccacagagaattcacgctacgtgatcgcgacgtttcagcacggtaatgggcgtgcgagtcttcgccagtttctgcgattgtcagacggccaacaccatctttccccgcacttactgcagtagtggcgcagccctcaacgccctcattctgcggtatgcctttttcaaagcaaggcatcgaaacctggtgtcttgttggaagcatggatgttcagccggcactgcagcgccataccgtaagctgtctccagatgcgtagccagcgagccacccatttcgatatgttgagataaaaccacctggtgatctgcatctgtaagaacattggtgaaaatgagccaggaatgcatgtgtggcgttgtctgggttatcgcttgagcaacactttctgagagagctctggccttgcgatcatcagtgatgaaggcttggcggattctgcttgcgaaggcgattgacgacagctcgccttttccgagtttttttcggctttcaagggctgcgatggcttggagatcgtcaatgctgcaggaatgggacgcgaatttgcccttggtctgctcttgcttgaggcgctctctcaactcgaggtctgcttcggtggcggctgtgcggggcttgaccaggcattcgtataggacgaatccagtcatgcagaactcacacttggcttcttgagctgccgcatacagtcggcgcgaagacaaaatgttccacaccgagcaggtgtcggccacattgatcttgtggaatttcgatggatcaatagccatgtattgtccttccatatagagaggcaagtgctgccagttcgccatagccgcagagaagagcttcggccagcctgccgaggctgatgatgccttggctatgtgcgtccaggcaaagcttcacgtaatggtcggacagaccgcgttcgagcagagcgacttttctcgcgcgttgctggagggtgaggctctcaggtagttcggggtctatcttggcttgtcgagtaacacggtaacctcggattcgtcgactggtatcaatgtcggctcgcttcgcggccttcaaggctatacccaaggcgtcacagctcactcgaaacttattagcccatccttgagcttcctcttcagaccaagtagttgggtcaggaagcaagctgagcgtttctggaggcatgaggtaacaggaggcgaacctattcgcccgcacctcctggatgtctttgtctcccgggatggttacgcttgctccttcttcactatcaaaaatgcagtgagccatctcgtgcgctgcactgaatcgctgtcggtaaacgtcctcggtgtagttaactaaaatgcatttgccggcgacggggtgcatcacaaagaggcctgagattttggagttgtctagctttcgccggaacacatgcacaccgactgagcgaaactcggagtagatgtctcggggcacctctcggtctgcatgacccatttgccggcgaaatgcctttgccgcgccctcggcatgagataggaagtagttaccccgtggggtgtaggcaaaggtactgacagcaccacggagttctcgggttaaaaattcttcggtttcgcagatgtacagaaactcttgaatggcagagcgatcttccttcgagaactcacggccatgcgcccggtagagcgtttcagtttgctcaaatggggcgacctgctcgtttgaaataaagaatttgaagtcgcatcgatagtagtcggcaaggatgagcacctcgtctccggtaggctccaacgcacctttctcgatactactcaggcgctcaacgttgattgctgtgaaagctgcgacttcgtcaacggttcgctcaagctgaatacggtagcgttgaagcttgtcgccaagggcctggagattcatgcgctgtttgacgtcctgttaggcaatgcaccgagacatcatagtcggttttcaaggcgctccacttctcgagtccacatctatatcgctttattggagcttgaatcgccggattgttagttggatcgctgagggtgcgagtcttccccatctcaccattcgttgaggtagcatcagcagcacaaactgcgcttaccagcccaaaccgcgctatgcaatttccaggaggaagtccatgtccgacgaatctagtcgtttgtctttgtttgaagaggactatcttctacgtgagcttgggcctgtggcccatgtaccgcaggtggcgcttactgagctggtcgcgaacgcttgggatgcaggcgcaagtctagttgaactgtttcttccatctgaactgggtggcaccttgactgtgatcgacgatggtcatggcatgacgcccaaacagtttagtcggcgttggatgacgcttcgctacaaccgactgaagcatcaaagctggaaagtggagtttcctaaagggaaggatggtaaagccagaaaagcttatggccgaaatggtgtcggtcgccacggacttctctgtttcgcggatgagtaccgtgtagaaacatggcgagatgggatactcagcacatttgtcgtgggtacggaatcagggccgagtccatttgtggttcgctctgaagagttcagtgagcgagagggtgaaggcactaggttgtcggttgtagtcaatcgcaaaatgcccgaccttgaagaaatcatcaccgttcttgcagcacgcttcatccacgatcctggatttcagatccgagttaatggaacccccctgacgttagcaaagcttgagcagcacgccaggtcgcacacgctgaccctcagtgaggggcggacggcgaaggtgatcgttattgattctactcagcagaatcactcatcgattcatcaaggcgttgcgttttgggtagatcatcgacttgtcggtgatccaacatgggctatcggtcaggtagcaaatttcgatggccgaactcgattcgccaaacggtacaagatcatcgtcgacactttgggtttcgaggatcacgtacttgcggactggacaggatttcgtacaacgccagcagtaaaagagttgtatcaggctacagccgaccacatcagtcaggttgctgatgagttagcagcagaagttgtcgagtccacttcagaagacgctcttgtccagaatcgtgctgaactcaagtcgttgggccagggggcgcagctcgaagtcactgaatttaccaaagctgttgctcaggcgcatccgatggtatctccggagtttttggcgacagcagtcaaagcggtgatcaatctggaaaagtccaagagtggggctgcgctccttcataaactcgccaacctagatacaaaggatgttgagggactcgatacgttgttggctgattggtctgtcaaagacgcacttcgcgtgttggatgagatagatgacagactgagcgtcatagaggccattgctaggctggcagaggatccgaacacagatgagctccacaccctccacccactgatcttgcgatcccgctggcttttcggcccggagttcgaatcagtggaatactgttcgaacaccacattgcgaagcgtagccaaacagctatggggcgacggggacgcatcgtttcagaacgagaaaaaacgcccagacgttgttgtcttgcctgatcgcagcatggtgcagctggtgggtatagagcgatttgatccgcaagacccgaccatcgcgcagatgcagaacatccttctgatcgagctgaagagagggggattcaaaatcaagcgggacgaggtcaatcaggccgacggttatgtgcaggatattgctaattctggatatgtaaatggcgcgccctttgtcacggcctgggtggtcggacagtcaattgcatcgggagtgggtaccgagaaaactgtaggtgatgactcgcgcaaatatggtcaagtcagagcaacgacttatggggcacttgtgggcacggctaacctgcgactgatgcgcttgcgtaagacgctggaggaacgatatgacaacctgccaaccgacacgttgctcgctaaggtgttatcgatccaagaacaggcaacgctcgatttaaatacgtcaaacccagtgcaacatcaggatgagagtgctgcgctggcagtcgctcagtgaagcatcgtatcaatctatgggttgattacaggtattagcgccgtcgcaattccggcctgtcgtcagcatcatagatttttccgcctgtgctgaagcaatcagcaaggctagttttgccaaaacctaatgaaagataccttcaagccggtgtcaaatactcaaggactctttgtgccttcaactctagtagacattatcatccgcgaccgaggcgcgcaggcttataccgattacgcggagtttcaaattaccgatcctgatgtgatcgttagtgccgctaggcaaacgctcgaatcgatccctccatcatttggttcttgcgtcatggtcagtgctggcttcactgcaattctcaaatctcaagggatacccgcagttgtcgtcctgggagacctgctgattaacggccagtatgctttcgaatgcagggggaacattccaggggcaacctacgagggagagtttgtggacgccaagtgggacggtcacgcttgggtaatgctcgcaggtgtcctctgcgacctgtcgatcttccgaagcgcctacgccactaaaacgccaagcaacctcaaaaccttcatcagccagcagttcggtgagggtaagggagcactgatgtgtcctcacgatagcttgccggtcggcatggagtttgtgcccaaatttgcgctcaatgacgatcagattctggggattctggacggtttgtccaggcaagcacttgagactaagtgacgaaattcgaggcggcattcccggctgtgtcgggagctgaatacggctagaaaataagggcggcgctgacatcagtgcgagattagccaggcttccattttttgcagtctgcccatttcgagaagcttcggttttcctaaatctaaaagcatgagtagctcttgcctgcactctggtgatggaaaccattcagcgacctcgacattgcagtgcctggactcactcagggcccatttcacaaccatgtccgctgctgctcggtagtgatccgccatgaagagtcgtcgcccctctgcaaaccaaccaagcttggctagttgttcagtgacgtcaatgacgcccgcgtgatcaaaaaaaccggtggtgtctggatagtgaatacctgccagagacaccttcgccgcccccgcttctcggtcgaagtaggacagaaaatgccacccacctgtagtgcttccagcgtgcggaaagttgatcgcggccttgccagtgatgtagtgcgtgcgggaaacgcgtttcagatcaaagtcaaatagcggctggttcatgggagcttgctgagacgcgccaagccttgttttatgtggcccgcgttttcgccaattgtgtagagcgcgccacgaacgttggcgccgacttcggcatgtccctgggcttccacctggagggtcagttccatgagcgcagcttcgagagcgagttggttttggtacatcctttccaaaacatctgacagcgagtattcaccgggcatctacatggactcctttattacgacgcagcatagctcagagatgagtcagcaagtgtcttacgggtagctcccggtgctcagcaactttgaactaatcatgacgaccacgcccctaaccctgtgcagatagccgctagctcaggtcaaccctgagcatcctatttacatacaaaggtttggtgaatcatgaagagcgaacaggtagaaggcgttgtagaaaaggttgccggcaaagcgcagagcgcagtcgggaaactgtttggtgattcgaagcttgaagccgaaggtgcgggacgctaggctgccggtcagttgacccaaacctatggcaatgcactggacagtgtgtctacgttcgtcaaagagaagccggttgctgcgcttgcaattggtgcagtagccctgctggtactagaccgtctcctgcgccgctgaaggtgggaggaaaagccttgagttgcttctcccgaaatcgtctctcgtactctccagggctatctctgaagggtgcgagggctatagggataccctggagagcactttatgagcgtcccgtccctcagtagtctcgaagtgtttgatttgcaagctggcacagcaatgagcccgaaggacagagatgccggctagacgcttggtcggtttttattgatccgccgtaccggatttatcagaggccgggcctccattgaagctaaaatcggtggtgccgttggtgatccattcgaccagcttttccttgtgtgtgtaagccaccactccacgtttttgagtcggatcgaatcttaagacgcgccatataccaaaatcggggccgaagtcgatgaacacgggtttggaaacccaccagcgagcaaaaagcttgctgcgggaatgccagctaaatgaagccagtccattctccgacacttttgacaaacccattctgaagttgtacctgtcgaactcagttcgcgtgccatcgatcacccagatcatattttgatagtagttttgcctcgcgatgacctcttcaggatgtattgtcgatctctgaaactcaataaccatccctgaaggcgttcggacatctgctatatgtcgctcccctgaggacgcttgcaacacaacttcctgccactcggttgggaacatattcttccaatcgcgatgccatgccgtttccgtttcccaccacggatcgcaattgtccaaacgtttatgagcccaatgccagacgacatggttcccgcatttagcgacggtctgggaaccacaaaaactgcaaacaccacgtgcttttggagtggcctctacacgagcgccttcaagcaatgagtatttcattttcttccttgatgctaaaaatgggggggcggcagctcttaacttcctagtcggcagtaccttgtaactcacaggacgaaagacaaatatctgagcacggaagtcgtcctagcagcctggcaggcctgcgtaaatgtctaaagaggcgggtggcggagggtgccccacttaaatcgccttcaggagacgctcaagcgtttgatgctcccatgtgctcagcatagcaatgggatctgtgccaaagcgatttcccgagtctaaagaccagcgccgtccgtcagggcttatgcactcttcgcagtagcccagctcatcgcggtcgttatgaatagatattcgccaaccttcgacattaactttgaagcgctccgcataaatttcttcccatcccctctcgcaggctctgaccataattaggcgcccaagagctacctccctcagcacttgcctgacctctcgcgctgagagtggagccccttcggcagcgccatctagctgcgacgaacgagctgccgctctggcctctttcaacaattgctcagcgtacatagccggatcatcatctggcagcgggtagcctgcagcagatagagcttcggcgcgctcttcaatgagcagacgctcgggatcgcgaaccgtttggtaggctctgcctggtacgcgtcgagttgtgtccattcccggctccccagaaggctgatgaataagagcgactaaattacttttagaacgataacagaacgcttcgaatagcgatgccgagctccgaatcatgagggtaggatgcattgcgatctatgcttcacataggctcagacaccaagcaagcggagcgcgcaggcgtgagggatgcgagcccgcaggggcgagacacgccttggcggggctcgattcacggcagcctgacgccgcaggcggcacgccatcaacgccaacaagagataactcaaatgcccgacgatgaactccgcgaactggaggccaagagacgaaaggctttgtggatgcttgcgaacctatctccaggcgattcgaaggcgttcgatcccttatccattcttgatgaccttgaacttcaagagcgaaaagactcccctcatgctgacaaggcacttgagctcaaccagcttcgggattgtgtcaccgtgcagtatcaccacgccggaattgacatcattttggagcagactatcccccagccctggagggagcgcttcaatcaggcgagtatcgggtcgaccaaattgttagatgggccttacgctgcggactggtataaattcctggcttgctgggaaacagagacgcaacacctagaggcacacagagctgcctgcagtaaccccaagctggattgatgcagacggagaatagacgtggaacgagacggcgatgacaccgtgtactgcgatatccagatgccagcagccgaaggcagagagcttttgcaactggtaaacaccttactagattcgaaagcctacccgagcttggacaaagttttcgagcacatgcagtacgagctcagcacatcgattgatatcctggataatccgcaaaagttgggccgatggcgcccgacacaacactgactgtaggtgctggcagcatgtcgtccagaacaccgccatcaagcgtggagctgagttcgtaacgaactgcaggtatgttcctcggattgatggaaagcgaagtaatcagtgaaaatttcgatgctgtgccatttgattttttgcaaatgaattagccaaacagtggcatactgcctttatttaaacgaaaggaatcgtagatgaacactcagctaacgcagtctcaggcagatcagattgacttagcactccataagaatatctacccgaggttgggaggaggagagcttacccaactggcgaagctgtttggttctaacggacttttaaggacgctgcgtacggttcttcgtccgccaccgccacctcaaccgttaaggggaaatccacccaatgtgtccgtaacagttcaattggcatggatcgacaaaagaccatatgcactaatggatcgtgaaaagcataaagttgaaattgctgatgttgctgttttttattttgatacaaaccggtggagcacgggaagtagcacgacagctcggtgcctgcttttacaggccaaagcagttaagactgcggctcaactatcggcacccacagtttgcttaaaccctcccgcccctaaatcaaatacaaccactgaacgagagcttcgacttttgtcgaagtggcctaagtttgatatgtatttgggctccaacagcaacattccccttgctactaacatacaggttcccttctcaaccagtcctccgccgatggggtggtttatgggaactccgatgatcagaccttccagttcacaagttggcacctgggttagcccatggatgtgtgctcctgcggagcagaatcacgcgtgtaatgaaacattgggaagtttactgtgtaggcatttttctggaggccagtcatcgaacataagcaagaggcccatagatgcgggcgctcccttcaactacgctcccgcctcccttaatcacggaaaccccacgtctaccaattgggatcggctgtgcatcgagatgatcagagccgtaagaggccagataatcccacctcatttgacaaacggtgcgccccaaaaccggttgcagcgggctgtgatgtactcgttcccagtgtggcctgcgcttaaagtgcttgctgcaaccgcactaaatatattgatgcggtttagcaaaaaacgcatgccgattttgattgtttcgcgagtatttgacgagacaccttagtcgtagtcgatttagttcgctggaggtgtccatgcgatctgggctagctgctaccttgtgaccgagatttacaggattcagttggctcagccgagtcatatcaggctgagcgactgataagaaaagctcgttcccgagatgctccttccccacgatcacgaccgcctgcatcggtttgacgagagcttgagcagcactgattcaccatctgcaatgcctcgggcagcgcggatatcggtacgtatgtctatcggctcgaagaccggttagatcacattgacgggaatcagtgagtgatagccctaataaattgtgcacaaatctcaaaatctgagcttggacgtttcccgtgagtgcttgcccgcccaacgctttgagctatcaacgctccatgccccaggcatccatcgcctcagtgacagtcgcataccagtggagctcaccaacctgtaaggcattcgcgatttgcctgttggtattgccgtcgccccaagtcgggagactctccatggctcctgtgaaaagactggctgtagcgacagcgaatcgccccgtacttgtagactggaggcacacgtagcgcaatgcagcgccactggaaagcctacgccaggccacgacctcaatgcagtccattggctccacaggagcctcgacggcgaaacccgcgccctcatccgccctatggctctcagatgctcggaacggcccgccaagcgctcttgggacgtgtacgaggtgcttcaactgctcacgtgcggaggcaatttgctcccggaactcttctggatcaatggacatggccccttccggcgtcaccctaagggtctggaggctgttcgcggcttggatgaacgcaagttcgcgctcaatctcacgctgaggacggcggtcttggcggatgagatcccatagcgcacggactattcgcatctgactattctccctggtatcggtaaacccacaccggcagcgcgtgaaactgtgatgactcaggttcacaagccgttccggtggagcagcaacactactcagcactctcgcggctgcttagccgcatttccagcttttcaaccagagctttgacgcttcggatctcaaccgacatatcaattttttgcagcttggatctatgctccagagcagtgagcgtgtctttaacagagtccagttcgtcttgggtctcaagcatcgaactgtaggtagaactcgaggtgagcgccttatattcagcgtgaaaataatgatggagagaagcagggtcagagtggccggtgagttgggccacctctgcgcaaacatcgtctcgcagcgccggcgtccaccctttctttagagcgggggtttgggcgaatctttcctccagcctgatattgatttgacgcgtgacaaaacgatgtctaaacatggacaggcaaacacgggtacctgacaaaccagcacctaaacacagtcggtcaaactccttagtgattgactcttttttcagtcgactaccgttttcacctaggaatatattgttgggctggtcgaaaaaaatattacgatctgctaggaagtcaatgtaagcgttcctggcttcaacgtaaattgcaaaccgccttgcatctgcagcattgattttaaaacggcgtaacggtgccggagttccgcgctttttagtggggatcacaatctctagtgtattcgaaatgttttgattgagctgaaggtcgaggtcaaatagctcctcaggacgtagtcctgtgagtttcatcattcttaacgtgaacatccgccgctcgtatagatacacactggtagcatcgtagagtttgaggtcactgattgatttaagcttggagctagcaggcagatcctcccagtctcgcttccggaaaatctcatcctggattttttggatgatgtgttcgtctattgccaccttgtcatcgttgtacggcacgggagctacgagcaggggatgaaccatgtaggatcgcttggttttgggatttatctcataagatatcgtgatatttgcaccactattctttaggcctaccaacggcgttttagaaagatctggatagttttctgttagccagtgcaaaaagttaagcgtggtgtgctggattagcctggtgcgattgttattccttgctggtgcgataccacgaagggtagacctggtttcttgaactagctgttcagtaaaatccttaaaattagtttcgttgaaattgctgaattgaatgctcttgacagagcaaaagcgaatgaagtgcgtgatgagcgctgcgtctaccctcgcagaatctctggcgcctgtggacgcgcagatctcagcgatccatagattggcaaggttgcacggcctaccgttaggccagcgaataagtacgaagttttcgatagtgcgtggctttccaatgaacgcctcagccttccgaatcggcatagctttgtctggcaggcttacggattcatattccgtgtagagttgcttacccatcctttttgccgccgtcgattaccttcattttctctgaagaaaatatctggtcgcttatcaggaaagattgatatttggccttggatgttttgactttaagtctgatggttgcgcggatttcgtcagcgctacggttgctctgagggtcaatacgctctaggaaagtcaggatgtcaaagtacgccatcgaggcgatgtgagcctccagcagcgcgatgcgtgcctgatccttgtctgaaggaaggttaggtgcaggcgccgggttaaccttgggagtcaacagggcaaatgccctggatctcatctgtagcatgttgtcccaaaggcttgacccagagatgccaaactgtgcgaccttagccgcttgcttcagggagttgagcgaaatcgatgtgaagcagccagcgacatccagtttgcagaagcctcgcatcgaggatagggctcgaagctgggctttcgacggtgtaatttcttcagatagcacctgtgaaagccaagtgtgacgagagtgaagatttttatttgttgtatctctcatctttttggcctcctaggcaaatggcgaaatcgatggtgtagatttcttcgtcgtaagattcaagcctgaccttatatgtggtcatatcgaactcaggttgttgcaccattttgtctaggtatttgagcaattccttgttgctaatcgaggcgatgctggtggctttgaagtgcttcaaggcttctatgtaaagcgctagaagcccttggtttgtatctttggacagcaagccgttttcaagagcaatgagcttgtcgtcgatgcattcggattcatatcggacggcttccgaatctgacggttcataatctgtgtaatcatcaatatgcttcctattggagtgacctgccatatacctcagcaattctttccctgaatctcctacgtgtctatgtacgagcaggaggaagaattttctcatctcgtgaatgcgcacataccatcgccgacctattttatcgacgggcagttggatagcatcgcagaaagtattaatgcacaggtttactttccattcgggaatttcgccactagggcatttgaatcctctgcccggaatataaaacagcctccctgcgtactctgattcatctccatagatatctgctagcttttcgccgagcacttggagtagctggatggcatgggcagcaacgtagggaatagggcgctcaatgaagtcgtttgcacccaactccccagttttgccaaccatgtggcccataaaagcgccattgttgccccggtcagtagataggcagttacgttcaagggtactaagctcagtattccgaataggttttacgatgccgataattatggcgcaagcgccataaaaagattccatcaccattttgtagttggttttatctacagggaaatttttcttctctttggtttggagcctgcttatgttgagcgcttggaatagcggctgggcaggtaggttttccatacctctcgtcatccaaaggtgttttgttttctggaagagctcgttcttttttacggactgtttcgacaatgaattgtcttcgtcaatagagacgaattgctcgatgtaaaaaatcagagactcaactatggcatttccgtagacggttatccacttgcaggcctgattcaggcatttgaagccaatatcaagaggtagcaatttggtgtggccacctggcttcaagtgtggcttgtaatcaagaacaagttgatcaatgttcagcttaatgtcggggatgtcttcgggcagaatatcatggccttggaaaaataattttaggcacgacattgtatccataaaagagctgatgcccatcgccccgtcagctgcttcatctattgtcttagtattttgagtgctgtgaaggtttgctcgtacacctctttgtagtaagtcgtcatgggctaaggccggctcaaactgcctaatgaacagtcgaaaatttgcattatgcagagacgttgaaggtcgaccgagaatggagccaataaagtctcttgacagcaatcctttatcataggtgctgttttgggcgctggagacatagagatcgtttcgagtaaagtaggaaatcgcttctcttgtgagctcaactggcagggcgtccgggtctgatataagatcttctaatgagaaggagagaggtaaaatatcgagcaggtgtgaaatgaaacgctccttcaacaacaaagcagcagtccatccaccctgactgaaagtttcggcgatagctttgcaggcgtcctcatcgaagagcctgaagccatgcgtactggtttcataagtatctttataaagattggcgcgtgccgccaaattcatagcgaagctaaagtatgtgatccatcgaccttccgcgactggtttacctgtaatggtgcccatgcgacagtgaaataaccatttctgcaccgtttccagcagcagcttattaggggcgtcggtgaggttggtgccgtccgccatcaagcgatcaaagctcatgcactgaagctttgacccacctggaaaactgaccagccattcctgacttccgatcccacctcttaccagccaatctgcttgatagctgtggctccttttatagattttgctttgccgttccgcgtgctcgatcatcgctttgatacgacgttcgtcgaatgaaaagtcttccattagatggccttccaatcggaaagggagactagcggacgaaggtcttgcttcaggatggtcgcacgagcatgcgattttcggagttcactcatggagtcgcccgaaaccctgcccgcaatagccatctcagcgttagatgcgctatcgaaatcgagggaaattgttttcgctactaaatccctgagcaccgggaagatccataagggcacgctagttcgctcatcgatcactaagcgttcttctggtgcaagcttatcgacggcatctgcgtatgcgtagatcgcggcaaggctacccgcactccgatcaaatagcagctcgcgctctacaaacatttcaattagagagctggggtcaggcgagtaatgacccagcttcgagcgtaaggcttcgcttaagggatctcccttcttaaggcctaatagtatccgtcggacaaaagcctgtagctcttctcgagtgctaaagtcagatgcagctaactgccaaggctcgccctctgttgctactaagatgaccttttgatgtagcaccctgaaaaacctcgtcgcccatcgatgaaccatccaggccggaatatatttatctctgaccacctgcaaagagttacccagcatgtccgctacggcctggagactaccagtacgcaaaaactccaaaatcccttgagtgcatcggatcgtgtagagattgaccatgcttggagttacgcctactttgtctagttcatctttatataaatcgtgcagagagagtccggcatttgtagtcaaggtttttgcaaagttaggactggagccaatttggtttctgctcgagacaaggaacagcttcctccacccgctcttaccctccgataaaaggcgtcgtcttggcatgtttgtacaccgaatcacatccataacgatccgagtgctcaatgggggaagtacagagaccttgcgtgactgcgcgcgaggtttgctaacgctgactgttattcgcttgttgtcactattgccgcgtaggtagaattttccgtctcgtcggtataaccttatgttggtcagtgatgatggattgaacgaaggattttctgatgcaatgatcgcacttgcaactgcgcagtctctgggtgacaagtagccgagtagtcggttgaaagtttcgttaactgtattgttatcgatacagtcgtcgccggcagcctcccacagtcgtgccctaagttttggcttgctatgggagttgtagattacgggcctgaagaaaggtagttcttgcaggtcgtcgaatgtcatcgatttaagctcgtcagtctgttcggcgtaatatcgagcgacggctagaaaccagttaatacctgtaggcgaatctggatgcgcaagatgaatcccatttctgctgaattgtccgctctcaagcaccgcctcgatttcgtcattcgagatgttcttacatagctcatcacctcgggcgtggcatcttagcattcgattccagtagtctaccgagcattcgacaatggcatcggcccttgtctcgagagtgttcttaagattaagtaggtacacgtcatcttcaaaactcaagccttcttccacaaggtattttttgggaagtagaaatcgtggccctttgggaataggcgtgtgcacagtcccgtaaccagccggttgagacatattctccgggtgactgacggagttcgcttttgcatctgggatgaatgtgtcttccggtataaatccatcccgcctcagttttttgtaaacaaacgccaccgcgttccaatggtcatatcgggttttgggcttatgatctttgttgtagaggtgatgggagtagtgtgtaagtatgaagttgctccagtcatcttccgcaggtgggaactttaaccggagcttggcaacgtggttgaaaatatatctacttgcccggaagcgtcctgaatagctagtagtctctccagtgatgcataataccctaaccgcatcggctactttatagagcacttctttgtcgacccacgatggagtgtggatggtagaaatcctgtagccgcgaatacattcatcatcatcccgcttgaatatgatgcgatcatcctgcacttggtaggtaagcataatgagatcctacgttgaaagcggcatagcgtagtgatttggttgctctggtcaagaactttcgtgcgtgcttctaaagttttaaacagtgtattaaaagcatactcttacatgtatttcggggcgggattttgcattaatctcacgtcgcagtgaaaggttggccgacaattgatatgttgtttggtatatctgttggtctgtttttcgctgataaggaattgccggcgctggacgctgatcagcgaatacgccgggtggcaggattaggctggacaagagggttcgtcgttatcggcatacataagcgtgggtgagtgcaaggaaggcggttgctccttcccagtgtacttagttcctagggagtatttcactgagcgattgcttggtcatcctcaaccaggtggtctctaatagctctttgccgggattgctggcggggcattaattaaagcaatattgacttagcgtttgaaccaattatcgatttatctcgtcgccgtgttctacggaatacaagcactacctccgcatatatttagtccggttggtgttcggcccctagcttgtggtatcgagtctaatgttaggctccgaatcggcttgaatcacgtccagcgcaaccgtgatttttttcaggtgtgactggacatcccgcgcctcgccgcagacagcactgcgatatgcgcctgctgtccaccgttgagattggtgatatgtggggggaggcaaaggcgatggacggtgcgctagggcttcccacccgtcaatccgagatgatgggcaacctggccacgatgaactcatatcgatcattgtgagatctctcttccgttctcagcctatgggaggtggtggagtgtcgatgaattcagcgttttttccgtctggggtatccgaagcacatggaaatgggtgtcaagttttaggtgtcaaaatcgttttctaagctgttgattcgtatagggttacaccttctagatgaattcatgtgtctagaaaaggattttgctcgacatcaacgggattctcggcctggccgcgctgatgggcggcatcaagcatggtgaacagtcttacaacgacgattcggcacgcacctatagcgtgatgatcctcaccgccatgggtgtgtcgatggtggtgccggaatttatccccgaagccgactggaaaatttactcagccttcaccatcggcgcgatggtggtgttgtacaccctgttcctgcgcatgcaggtggggccgcacagttatttcttcagttacagctacccggaaaaacgccgcaagaaactgccggaagagcaggaggagccgccggtcaacctggcgttttccatcggcaccctggtgtttggggtgattgtgatcggcgcattggccgaggtgatgtccaagactttggacctgggcctggaaggtacaggcgcgccgccggtgatcacggcgatcgtggtcgcggctatttcggcggcaccggagattctgaccgcgttacgtgctgcgttggcgaaccgcatgcaatcggtggtgaatatcgcgctgggtgcttcgctgtcgacggtgatcctgacggtgccggtgatggaggcgatggcgctctacaccggccagccgttccagatggcaatgacgccggtgcaaacggtgatggtgtttatcacgctgattgtcagcgcgatcaacctcaacgatggcgaaaccaacgccatcgaagggatgacccattttgtgttgtttgcgacctttatcatgttgtcgctgttggggctctgaatcaccgagaaacagtgtgggagggggcttgccccctcccacatttttaatcggcgtctggtctaggttccggcgatcaactggcgcgccgcctgggtgtgatcggcgatcaggcccttgaggtccaggccttcgacctggccatcgatcacgcgccatttgccgctgatcatcacccgatccgcgcggtctgcaccgcatagcagcaacgccgaaatcggatcatggctgccggagaaacgcagctcatccagcttgaacagcgccaggtcagcctgcttgcctacggccaattcgccgatatccgtacgccccagcaactgcgccgaacccttggtcgcccaactcagcacgccctccggggtgattttttccgcaccataacgcagccgctggatatacagggcctgacgggcttcgaggatcatgttcgacgcatcgttggaggctgaaccgtccacacccaggccgataggcgcgcccgctgcgagcaggtcccgggtcgggcagatgccggaggccaggcgcatgttcgagcttgggcaatggcagatgccggtgccggcggcgcccaggcgcgcgatttcatccgggttgaagtgaatgccatgggctagccaggtgcgcggtccgagccagccgacgctgtccaggtagtccacggtgcgcaggccgaaacgttgcaggcagaagtcttcctcgtcgagggtttccgccaggtgagtgtgcaagcgtacatccaggcgattggccagttcagcgctggcttccatgatttccggggtgacggaaaacggcgagcagggcgccagggcgatctggatctgcgcgccgtcgccgcgctcgtggtatgcgcggatcaggcgctggctgtcttcgaggatgacctggccttgctgcacggtctgttgcggcggcaggccgccgtcggcttcacccaaactcatggaaccacgggtgagcatggcgcgcatgcccaactcgcggacgctttccacttgtacgtcgatggcgttttccaggccgtcggggaacaagtagtggtggtccgccgctgtggtgcatcccgagagcagcaattcggccagtgcgactttgctggcgagagcgagcttttccggggtgagccgtgcccagaccgggtacagggtcttcaaccagggaaacaagggttgattgaccaccggcgcccaggcgcgggtgagggtttgatagaaatgatggtgggtgttgatcagcccgggcaggaccacatgttcacgggcgtcgaacacctgcgcgcagggcagcgcgggttcttggccctgggccaggacttcggtgatcacaccgtcttgcagcaccaggccgccacgggcatcgaggccattggcggtgaaaatcgcgaggggtttttttaaccagatacgggtcgcaggcattggccggctcctctgaatgatgggttcaggtttgccagctcagtgttgccctgtctgctgatccagggtcgccggtgaaggcgagggggcagtctacgcgcggatcgttatcgacggcaatcggtcgataacaatcccgcaccgcttaccaggcgatggtgtcgcctttgtagtcgatgaagtgatggccgcctttgccggtgtaggcgttcacctggtcgaccaggccgcgcacgctggtgtcgacatcgatgtgcgcgttttcgccgcccatgtcagtcttcacccagcccggatgcagcgacaatacggtcagtttgtgatcacccaactgagtgatgaagctgttggtcatggagttgagtgccgccttgctggctttgtacagcgccaggtccgagccgtcggggatggccacgctgcccagcaccgaactcatgaacgccagcacgccagtgtccttgcggatctgcccgacgaaacgctgagccaggttgatcggcgctacggcattggtgaaaaacagttggccgacttcggccagggtggcgtggcccggctcctgattggcagggcccttgacgccggcgttgacgaacagcaggtcgaaggtgctggccttgaggcgttggctcagggcgatcacggcttgctgatcgtccatgtcgagcttctcgatctgtaccggcccaacggctttcagcgcatcggccttgctcgggtcacgcacggtggcggtcacgtcccagccgtcctgaagcagttgcttgaccaggccgaggcccaggccgcgggaggcgccgatgatcagtgcggtttttggcgtagacatgaaaagcttcctttagcgtcgcggttcacggagttcaacgttgtagcaggatacgcccacggctgaggtcggcgagttgaatttgcagggtgtcgatatgcgcttcgcccaaggccagttgcagctcgacgccgttggcggtgaaggtttcttcgaccaccagtccacccagctcagccacacgcaatttcaccaggttcagttcggcgaagccacaggcgcaactcaaggggacacggctgatcagttcgatgcggtcggccgtttgcaggcacttattcgcgccaccgccgtaggcccgggcgaggccgccggtgcccaactggatgccgccgtaccagcgaatcaccagcaccgccacctgatcaaaaccctgtgcctcgatggccgccaggatcggccgcccggcggtgccgccgggttcgccatcgtcgttgctgcggtattgatcggccagtttccaggcccagcaattgtgcgtggcgttcaagtcgctgtgttgctcgaaaaacgcctgggcgtcttgcgggctggtgatcggtgcggcgagggtgataaagcggcttttgcgtatttcttcgcgaaactcgcaaaggccggtgagcgtgaaaggcataagtcgcttcgtttaatgggcgggcttgatgccgcagcccttgaggatgatatggatcaggttggtgccggcgtcttccatgtcctgcttggtcagcttggtgcgaccggtgacgcggcagatctgggtggcgaagtcggcatagtgctgagtgctgccccacagcaggaagatcaggtgcactgggtctatcgggtccatcttgccggcgtcgatccaggcctggaacacggctgcccggccgctgaaccaggcgcggtagtcctggctgaaatattcggtgaggcattcgccgccactgatgatctccatggcgaagattcgcgaagcctgtggctggcgccgcgagaactccatcttggtgcggatgtagcgggtgagcgccgcggccgggtcatcctcggcggtcagcgtgttgaaagtgctgtcccacagttcgaggatattactgagcaccgcgatgtacaggcccagcttgttggtgaagtagtaatgcaagttggccttgggcagcccggcactggccgcaatggtgttcatgctggtgcctttgtagccatggcgcgcgaactcgtcttcagctgcctgcagaatcgcttgttcgttcttttgccgaatgcggctggcgggcttaccggcgtgggtgctgtgggcaggaacttcgaggctcatggaggtttccgtgctgatcgattgagacgacgtgtgcacagataacccaccctcaagcctcagacaagtcctgatgcaataaaaccgtcaaagcggttccaggctgtcgctttccggcgctttgtttgcggcagcgttgagggccttgctttccggcagcagcaagcacaatacgatggccgtcagcccgccgctggtgatggcggagtcaaacaggttttgtatgagcgtcggcatctgatgcagcaggttcggctgggcggcgatgcccaggccgacgccaaacgaagtggcgatgatcagcatgctgcgccggtccagcggcgcctgggcgaggatgcgtacgcccgcagcggcgacactgccgaacatcaccagcgtcgcgccgcccaataccggcttggggatttgctgcagtactgcgccaatcagtggaaacaaaccgagacaaaacagcaccacgccgatgtacaggccaacgtaacggctggccacgccagtgagttggatcacgccgttgttctgcgcgaaggtcgtgttggggaaggcgctgaaggtggcggcgatcatgcagctcacgccatcaccgagtacgccgcccttgagtcggcttatataagaagggccactgataggttggcgggcgatcatgcagttggcggtgaggtcgccgacggtttcaatgctgctgatcagataaatcagcgcgatcggcaggaaggcgctccagtcgaagttgaaaccaaagcggaacgggatcggcaggctgaccagcggcaggtcgggcaaggcttgaggcacgagcttgccgctgaaccacgcagccaggctgccgagcgcgaggccgataatgatggccgagaggcgcacccaggctgtgttcgaacggttgagtagaatgatcgtcagcaccacgaacagacccagcgcgaggttggtgggtgcgccgaagtcgggtgcgttgaagccgccgccaaggtcagtgataccgaccttgatcaagctgatgccgatcagggtgatgacaattccggtcaccaggggcgtgatcacccggcgcagttgcccgataaaccggctcaacacgatctgtaccacggcgccgaaaaagcacacgccgaagatcatcgccatgatgtcttccgggctgccgccgcgttgtttcaccagaaagcccgccgacaacactgcgcccagaaacgcgaagctggtgccttgcaggcagatcatcccggcaccgataccaaatggcctgcgcgcctgaatgaaggtgccgacaccggagaccatcaacgccatgctgatcaggtaaggcaaatgggcggtgaggcccagggtggagccgatgatcagcggtggagtgatgatgccgacaaatgcagcgagtacatgttgcagtgcggcgagaaaggccggcgcgggtttcgggcggtcgttgaggccgtagataagatcgctgctgttggacgcttctggtggcatggcgggcaaactcaaggtctatgtccctgggttgttgcaaaaaactgtccaactgctcagcttttagctgcgaggccgagttagcgggttgctgcgaggctttccaggaagctttccagcaccaaatgggggcgccggcctttgcgcgtgaccgatgcgaggcttaaatcgtaaaaacgcgtagccggtttcagcgcacgcagtcggccttgttgtacccacaggctcgcgtagtggtcgggcaggtagccgatgtagcggccggtgaggatcaggaacgccatgccttcgcggtcggaggcgctggccgtgcagttgagcgcctggtaatgggcctggatctcggcgggcaggcggaaggtcggagcgatggcgtcctgggcatcgatgcgtgcatcgtcgagttgcttgttgtcggcgtagaacaaggggtggccgactgcgcagtagagcagtgagcgttcgctgtacagcggctggtattccaaccctgacagggcgctggcctgggggactacgccgacatgcaggcgaccgtcgagtacgccttgttcgacttcgttgggggcgatcatacggatctggatctgcacgtccggcccgcgctccttcagctgcgcaagtgcgtgggtgatgcgcatgtggggcagggtgaccagattatcggtaaggccgatgatcagctcgccgcgcaagtgctggtgcaggccattgacctcggtgcgaaagctttccagggcacttagcagttgcagggccgactggtagacctcgcggccctcttcggtcagggaaaaaccggcgcggccgcgttggcacagtcttaatccgaggcgttgctccaggtcgctcatttgctggctgatcgccgagcgcccgatacccagcacggtttccgccgcagaaaagccgccgcactccaccacgctgcgaaagatgcgcagcaggcggatatcgaagtcgctgacttgggccaggggatcgggtcgacggctgctcatagtttagtgaaggcctgactgaaggttagaagagttgaatttcaccgactttatcgccgtggcaatttagctgcaacaacgcttttcaatcccgacgctgccttttgccctgcgaggttttgctgatgaacatgcccgaaaacgccccatcgtccctggccagccaattgaagttggacgcgcactggatgccgtacaccgccaaccgtaacttccagcgtgacccgcgcctgatcgtggccgccgaaggaagctggttgaccgatgacaaaggccgcaaggtgtatgactcgttgtcgggcctgtggacctgtggtgccgggcatacgcgcaaggagattcaggaagcagtcgccaaacaactggggactctggactactcgccgggcttccaatacggtcatccattgtccttccaattggcggaaaagatcaccgacctgaccccaggcaacctgaaccatgtgttcttcaccgactctggctccgagtgcgccgatacggcggtgaagatggtgcgtgcgtactggcgcctgaagggccaggccaccaagaccaagatgattggccgcgcccgtggctatcacggtgtgaacattgccggtaccagcctgggtggcgtcaacggcaaccgtaagctgtttggccagggcttgatggacgttgaccatttgccgcacaccttgctggcgagcaatgccttctcccgtggcatgccggagcagggcggtattgcgctggcagacgaactgctcaagctgatcgaattgcacgatgcgtcgaacatcgccgcagtatttgtcgagccaatggccggctccgcgggtgtgctggtgccgccacagggttacctcaagcgtctgcgtgagatctgtgatcagcacaatatcctgctggtgttcgatgaagtgatcaccggtttcggccgtaccggctcgatgttcggtgccgacagcttcggcgtgaccccggacctgatgtgcatcgccaagcaagtcaccaacggcgcgatcccgatgggcgcggtgattgccagcagcgagatctaccagacattcatgaatcaggcgacgccggagtacgcggtggaattcccccacggctacacctactcggcgcacccggtggcctgcgcggctggcctggcggcattggacctgttgcagaaggaaaacctggtgcagagcgtcgctgaggttgccccgcaatttgagaacgcgctgcatggcttgaagggcagcaagaacgtgatcgacatccgcaactacggcctggccggcgcgatccagattgccccgcgtgacggtgatgccatcgtgcgtccattcgaggctggcatggccttgtggaaagccggtttctacgtgcgctttggcggtgacacgctgcagttcgggccaaccttcaatagcaagccgcaggacctagatcgcctgttcgatgcggtcggcgaagtgctgaacaagatcgactgatttctccttctatatagaacaactttttcaggagccccgcatgagccttatccagcatttgatcaacggtgagttggtcaatgattccggccgtagtgctgacgtgtacaacccgtcgaccggccaggtgattcatcaagtgccgttggccagccgtgaaaccatccaacaggcgatcgactccgccaaggcagcgttcccggcctggcgtaatactccgccagccaagcgtgcgcaggtgatgtttcgtttcaagcaattgctggaacagaacgaagcgcgtatctcgcaattgatcagcgaagagcatggcaagacgctggaagatgccgccggtgaattgaaacgcggtatcgagaacgtcgagtatgcgtgctctgcaccggagattctgaagggtgagtacagccgtaacgtaggaccgaacattgatgcctggtcagatttccagccgctgggcgtggtggccggtattacaccgttcaacttcccggcgatggtgccgctgtggatgtacccgctggcgatcgtttgcggtaactgtttcatcctgaaaccatcggagcgtgatccgagctcgacattgctgattgcacaactgctgcaggaagccgggttgcccaaaggcgtgctcagcgtggtgcacggcgacaagggcgcggtggatgcgctgatcgaggcgccggaagtgaaagcgctgagtttcgtgggttcgacgccgattgccgagtacatctattccgaagcgaccaagcgtggcaagcgcgtacaggcattgggtggagcgaagaaccacgcggtgctgatgccggatgcagatctggataacgccgtcagcgctctgatgggggcggcatacggttcctgcggcgagcgttgcatggcgatctcggtggcggtgtgcgtgggcgaccaggtggcggatgcgttgatcgccaagctggtgccgcaggtcaaggcgctgaagattggggcggggacttcttgtggcctggatatggggccgctggtgaccggtcaggcgcgggataaagtcagtggctatatagaagacggtgtctcagcgggcgccaagttggtggttgatgggcgtgggctgagtgttgcgggccatgaagaaggtttcttcctgggcggtagtctgtttgatcatgtgacgcctgaaatgcgtatctacaaagaggagatctttgggccggtgctatgtgttgtaagggtggatagcctggaagcggccatgcaactgatcaacgatcatgaatacggtaacggtacgtgtatcttcacccgtgacggtgaagcggcgcgtctgttctgtgacgagattgaagtgggtatggtgggggtgaacgttccattgccggtgccggtggcatatcacagctttggtggctggaagcgctcgctgtttggcgacctgcatgcctacgggccggatggggtgcgtttctatactcgtcgcaaggcgattacccagcgttggccgcaacgggccagccatgaagcctcgcagtttgctttccctagcttataagtagtgctgaaagccggccccttggggccggctttcgcgtttctggggcttttttgacccatgtgacagaaatatgaaaaaaggtgttgacggcagattctggaagtctataattcgccccacttccggcgcagtcgaaacggaaaactccttggtaaacaaagagttacgcagaattcgacagcgacttgcttcagttcatcg
